(19) United States
(12) Patent Application Publication
(10) Pub. No.: US 2024/0392292 A1
(43) Pub. Date: Nov. 28, 2024

(54) RNAi Agents for Inhibiting Expression of Coronavirus (CoV) Viral Genomes, Compositions Thereof, and Methods of Use

(71) Applicant: Arrowhead Pharmaceuticals, Inc., Pasadena, CA (US)

(72) Inventors: Christine I Wooddell, Madison, WI (US); Anthony Nicholas, Oregon, WI (US); Audra Winter, Lake Mills, WI (US); Casi Schienebeck, Deerfield, WI (US); Tao Pei, Middleton, WI (US)

(21) Appl. No.: 18/791,757

(22) Filed: Aug. 1, 2024

Related U.S. Application Data
(63) Continuation of application No. PCT/US2023/061856, filed on Feb. 2, 2023.
(60) Provisional application No. 63/306,045, filed on Feb. 2, 2022.
(60) Provisional application No. 63/376,297, filed on Sep. 20, 2022.

(51) Int. Cl. C12N 15/113; A61K 9/00; A61K 47/54; A61P 31/14

(52) U.S. Cl. CPC C12N 15/1131; A61K 9/007; A61K 47/545; A61P 31/14; C12N 2310/11; C12N 2310/14; C12N 2310/315; C12N 2310/321; C12N 2310/322; C12N 2310/334

(57) ABSTRACT

Described are RNAi agents, compositions that include RNAi agents, and methods for inhibition of coronavirus (CoV) viral genome. The CoV RNAi agents and RNAi agent conjugates disclosed herein inhibit the expression of a SARS-CoV-2 viral genome, and the targeted portions of the genome are conserved across a variety of known coronaviruses. Pharmaceutical compositions that include one or more CoV RNAi agents, optionally with one or more additional therapeutics, are also described. Delivery of the described CoV RNAi agents to pulmonary cells, in vivo, provides for inhibition of CoV viral genome expression, including SARS-CoV-2, which can provide a therapeutic benefit to subjects, including human subjects, for the treatment of various diseases including COVID-19.

### CROSS REFERENCE TO RELATED APPLICATIONS

[0001] This application is a continuation of PCT application PCT/US2023/061856 under 35 U.S.C. 111(a). This application claims the benefit of priority of PCT application PCT/US2023/061856, filed on Feb. 2, 2023, which claims the benefit of U.S. Provisional Patent Application Ser. No. 63/306,045, filed on Feb. 2, 2022, and U.S. Provisional Patent Application Ser. No. 63/376,297, filed on Sep. 20, 2022, the contents of each of which are incorporated herein by reference in their entirety.

### SEQUENCE LISTING

[0002] This application contains a Sequence Listing (in compliance with Standard ST26) which has been submitted in xml format and is hereby incorporated by reference in its entirety. The xml copy is named 30702-US1_SeqListing.xml, created Jul. 31, 2024, and is 4939 kb in size.

### FIELD OF THE INVENTION

[0003] The present disclosure relates to RNA interference (RNAi) agents, e.g., double stranded RNAi agents, for inhibition of coronavirus (“CoV”) viral genome expression, including severe acute respiratory syndrome coronavirus 2 (SARS-COV-2), compositions that include CoV RNAi agents, and methods of use thereof.

### BACKGROUND

[0004] Coronaviruses (CoVs) are a large family of single-stranded RNA viruses capable of infecting animals including humans, and causing respiratory, gastrointestinal, hepatic, and neurologic diseases (Weiss and Leibowitz, Adv Virus Res 81:85-164 (2011)). There currently exist six identified human coronaviruses: two alpha-CoVs (HCoVs-NL63 and HCoVs-229E), two beta-CoVs (HCoVs-OC43 and HCoVs-HKU1), severe acute respiratory syndrome-CoV (SARS-CoV), and Middle East respiratory syndrome-CoV (MERS-CoV) (Wu et al, Int J Infect Dis 94:44-48 (2020)). The symptoms of CoVs vary from mild ailments similar to what is caused by the common cold with a fever, sneezing, cough, sore throat, or runny nose, to very severe cases of pneumonia and even death.

[0005] In December 2019, a contagious disease caused by severe acute respiratory syndrome coronavirus 2 (SARS-CoV-2), named Coronavirus Disease 2019 (COVID-19) was identified in Wuhan, China. SARS-CoV-2 is a positive-sense single stranded RNA (+ssRNA) virus. COVID-19 subsequently spread worldwide causing a global pandemic.

[0006] While highly effective vaccines against SARS-CoV-2 have since been identified that are capable of reducing severe outcomes in most subjects, breakthrough infections of vaccinated individuals still occur and the duration and extent of protection provided by the vaccines appears to wane over time, necessitating recurring booster vaccinations. Further, while certain small molecules, antibodies, and other alternative treatments have been shown at least anecdotally to alleviate symptoms of symptomatic COVID-19 infected individuals, in many cases the mechanisms of action remain scientifically controversial and none has been accepted universally as a sufficient therapeutic. Moreover, it is unknown what extent any of these alternative treatments may be successful at treating future CoV-related diseases.

[0007] Utilizing RNA interference to silence a viral genome has been successfully employed in humans and animals against, for example, the hepatitis B virus (HBV), and it is plausible that a similar approach can inhibit SARS-CoV-2 replication. However, to date, others have failed to design an RNAi agent that can provide advantages over the existing vaccines and alternative treatment options for patients (see, e.g., https://investors.alnylam.com/press-release?id=25901, 3 Aug. 2021 Press Release Announcing Discontinuation of RNA interference ALN-COV program “based on availability of highly effective vaccines and alternative treatment options” (last visited 30 Jan. 2023)). Thus, there remains a need for a therapeutic that can silence viral genomes of SARS-CoV-2, and in particular an RNAi agent with the potential to inhibit the replication of other CoV genomes beyond SARS-CoV-2 that may arise in the future.

[0008] While in vitro screening of potentially active sequences that are complementary to a known gene or genome being targeted is routine, the lack of a reliable correlation between in vitro data and in vivo activity frequently renders this screening exercise incomplete and potentially misleading, as often the most potent RNAi agent sequences in vivo are not always the most active performers in vitro. (See, e.g., D. Pascut et al., Biosci Rep. 35(2) (2015) (“In other words, the siRNA-mRNA target features involved in siRNA efficacy extracted from data that have small sample size and unique experimental settings (i.e. a set of siRNA against the same target or a restrict number of targets) are likely to perform unsatisfactorily when applied on large datasets under different experimental settings. In vitro experiments could not accurately represent the dynamic setting encountered in vivo.”)). Further, such screening fails to account for potential and unintended off-target effects, which can only be confirmed by in vivo exploration and confirmation. (See, e.g., P. Kamola et al., PLOS Computational Biology 11(12) (2015) (“While high on-target knockdown is essential, it is important to address the problem of unintended off-target effects”).

[0009] To be useful as a therapeutic against SARS-CoV-2 and potentially other future CoV outbreaks, the CoV RNAi agent must be able to silence highly conserved sequences in essential RNAs. Thus, identifying a highly-specific and conserved nucleotide sequence for an RNAi agent against CoV genomes (and specifically including a SARS-CoV-2 genome) that is proven to be capable of being delivered in vivo to the lung tissues and can provide highly potent and durable genome knockdown with minimal off-target effects is a significant challenge, but is required for the discovery of a useful RNAi agent therapeutic against CoV.

### SUMMARY

[0010] There exists a need for novel RNA interference (RNAi) agents (termed RNAi agents, RNAi triggers, or triggers), e.g., double stranded RNAi agents, that are able to selectively and efficiently inhibit the expression of CoV viral genomes, including but not limited to selectively and efficiently inhibiting the expression and thus the replication of SARS-CoV-2. Further, there exists a need for compositions of novel CoV-specific RNAi agents for use as a therapeutic or medicament for the treatment of COVID-19 and/or diseases or disorders that can be mediated at least in part by a reduction in CoV viral genome expression.

[0011] The nucleotide sequences and chemical modifications of the CoV RNAi agents disclosed herein, as well as their combination with certain specific targeting ligands suitable for selectively and efficiently delivering the CoV RNAi agents to pulmonary cells in vivo, differ from those previously disclosed or known in the art. The CoV RNAi agents disclosed herein provide for highly potent and efficient in vivo inhibition of the expression of a SARS-CoV-2 genome, and because of the conserved nature of the RNAi agent antisense strand sequences disclosed herein, are expected to effectively inhibit numerous coronavirus genomes beyond SARS-CoV-2.

[0012] In general, the present disclosure features CoV RNAi agents that are specific to SARS-CoV-2 and target a portion of the genome that is conserved across other CoV genomes, compositions that include the disclosed CoV RNAi agents, and methods for inhibiting expression of a SARS-CoV-2 viral genome and/or other CoV genomes in vitro and/or in vivo, using the CoV RNAi agents and compositions that include CoV RNAi agents described herein. The CoV RNAi agents described herein are able to selectively and efficiently decrease expression of a SARS-CoV-2 viral genome and potentially other CoV genomes.

[0013] The described CoV RNAi agents can be used in methods for therapeutic treatment (including potentially preventative or prophylactic treatment) of symptoms or diseases related to CoV viral infection, including but not limited to COVID 19 and lung inflammation.

[0014] In one aspect, the disclosure features RNAi agents for inhibiting expression of a SARS-CoV-2 viral genome or another CoV viral genome, wherein the RNAi agent includes a sense strand (also referred to as a passenger strand) and an antisense strand (also referred to as a guide strand). The sense strand and the antisense strand can be partially, substantially, or fully complementary to each other. The length of the RNAi agent sense strands described herein each can be 15 to 49 nucleotides in length. The length of the RNAi agent antisense strands described herein each can be 18 to 49 nucleotides in length. In some embodiments, the sense and antisense strands are independently 18 to 26 nucleotides in length. The sense and antisense strands can be either the same length or different lengths. In some embodiments, the sense and antisense strands are independently 21 to 26 nucleotides in length. In some embodiments, the sense and antisense strands are independently 21 to 24 nucleotides in length. In some embodiments, both the sense strand and the antisense strand are 21 nucleotides in length. In some embodiments, the antisense strands are independently 18, 19, 20, 21, 22, 23, 24, 25, 26, 27, 28, 29, or 30 nucleotides in length. In some embodiments, the sense strands are independently 15, 16, 17, 18, 19, 20, 21, 22, 23, 24, 25, 26, 27, 28, 29, 30, 31, 32, 33, 34, 35, 36, 37, 38, 39, 40, 41, 42, 43, 44, 45, 46, 47, 48, or 49 nucleotides in length. The RNAi agents described herein, upon delivery to a cell expressing SARS-CoV-2 such as a pulmonary cell, inhibit the expression of one or more SARS-CoV-2 viral genome variants in vivo and/or in vitro through the RNA-induced silencing complex (RISC)-mediated cleavage of the viral RNA genome and RNA transcripts.

[0015] The CoV RNAi agents disclosed herein are designed to target a SARS-CoV-2 viral genome (see, e.g., SEQ ID NO:1) in a region of the genome that is anticipated to be conserved across a variety of different coronaviruses. In some embodiments, the CoV RNAi agents disclosed herein are designed to target a portion of a SARS-CoV-2 viral genome having the sequence of any of the sequences disclosed in Table 1.

[0016] In another aspect, the disclosure features compositions, including pharmaceutical compositions, that include one or more of the disclosed CoV RNAi agents that are able to selectively and efficiently decrease expression of a SARS-CoV-2 viral genome or a different CoV viral genome. The compositions that include one or more CoV RNAi agents described herein can be administered to a subject, such as a human or animal subject, for the treatment (including potential prophylactic treatment or inhibition) of symptoms and diseases associated with coronavirus infection, including but not limited to COVID-19 and lung inflammation.

[0017] Examples of CoV RNAi agent sense strands and antisense strands that can be used in a CoV RNAi agent are provided in Tables 3, 4, 5, and 6. Examples of CoV RNAi agent duplexes are provided in Tables 7A, 7B, 8, 9, and 10. Examples of 19-nucleotide core stretch sequences that may consist of or may be included in the sense strands and antisense strands of certain CoV RNAi agents disclosed herein, are provided in Table 2.

[0018] In another aspect, the disclosure features methods for delivering CoV RNAi agents to pulmonary epithelial cells in a subject, such as a mammal, in vivo. Also described herein are compositions for use in such methods. In some embodiments, disclosed herein are methods for delivering CoV RNAi agents to pulmonary cells (epithelial cells (including alveolar type I and type II pneumocytes), mesenchymal cells (including smooth muscle cells and fibroblasts), immune cells (including macrophages and mast cells) and endothelial cells) to a subject in vivo. In some embodiments, the subject is a human subject.

[0019] The methods disclosed herein include the administration of one or more CoV RNAi agents to a subject, e.g., a human or animal subject, by any suitable means known in the art. The pharmaceutical compositions disclosed herein that include one or more CoV RNAi agents can be administered in a number of ways depending upon whether local or systemic treatment is desired. Administration can be, but is not limited to, for example, intravenous, intraarterial, subcutaneous, intraperitoneal, subdermal (e.g., via an implanted device), and intraparenchymal administration. In some embodiments, the pharmaceutical compositions described herein are administered by inhalation (such as dry powder inhalation or aerosol inhalation), intranasal administration, intratracheal administration, or oropharyngeal aspiration administration.

[0020] In some embodiments, it is desired that the CoV RNAi agents described herein inhibit the expression of a CoV viral genome in the pulmonary epithelium, for which the administration is by inhalation (e.g., by an inhaler device, such as a metered-dose inhaler, or a nebulizer such as a jet or vibrating mesh nebulizer, or a soft mist inhaler). In some embodiments, the viral genome being inhibited is SARS-CoV-2.

[0021] The CoV RNAi agents described herein can be delivered to target cells or tissues using any oligonucleotide delivery technology known in the art. In some embodiments, a CoV RNAi agent is delivered to cells or tissues by covalently linking the RNAi agent to a targeting group. In some embodiments, the targeting group can include a cell receptor ligand, such as an integrin targeting ligand. Integrins are a family of transmembrane receptors that facilitate cell-extracellular matrix (ECM) adhesion. In particular, integrin alpha-v-beta-6 (αvβ6) is an epithelial-specific integrin that is known to be a receptor for ECM proteins and the TGF-beta latency-associated peptide (LAP), and is expressed in various cells and tissues. Integrin αvβ6 is known to be highly upregulated in injured pulmonary epithelium. In some embodiments, the CoV RNAi agents described herein are linked to an integrin targeting ligand that has affinity for integrin αvβ6. As referred to herein, an “αvβ6 integrin targeting ligand” is a compound that has affinity for integrin αvβ6, which can be utilized as a ligand to facilitate the targeting and delivery of an RNAi agent to which it is attached to the desired cells and/or tissues (i.e., to cells expressing integrin αvβ6). In some embodiments, multiple αvβ6 integrin targeting ligands or clusters of αvβ6 integrin targeting ligands are linked to a CoV RNAi agent. In some embodiments, the CoV RNAi agent-αvβ6 integrin targeting ligand conjugates are selectively internalized by lung epithelial cells, either through receptor-mediated endocytosis or by other means.

[0022] Examples of targeting groups useful for delivering CoV RNAi agents that include αvβ6 integrin targeting ligands are disclosed, for example, in International Patent Application Publication No. WO 2018/085415 and International Patent Application Publication No. WO 2019/089765, the contents of each of which are incorporated by reference herein in their entirety.

[0023] A targeting group can be linked to the 3′ or 5′ end of a sense strand or an antisense strand of a CoV RNAi agent. In some embodiments, a targeting group is linked to the 3′ or 5′ end of the sense strand. In some embodiments, a targeting group is linked to the 5′ end of the sense strand. In some embodiments, a targeting group is linked internally to a nucleotide on the sense strand and/or the antisense strand of the RNAi agent. In some embodiments, a targeting group is linked to the RNAi agent via a linker.

[0024] In another aspect, the disclosure features compositions that include one or more CoV RNAi agents that have the duplex structures disclosed in Tables 7A, 7B, 8, 9, and 10.

[0025] The use of CoV RNAi agents provides methods for therapeutic (including prophylactic) treatment of diseases or disorders related to coronavirus infection, such as COVID-19 caused by SARS-CoV-2. The CoV RNAi agents disclosed herein can be used to treat various respiratory diseases and injury related to coronavirus infection. In some embodiments, the CoV RNAi agents disclosed herein can be used to treat or prevent a pulmonary inflammatory disease or condition.

### Definitions

[0026] As used herein, the terms “oligonucleotide” and “polynucleotide” mean a polymer of linked nucleosides each of which can be independently modified or unmodified.

[0027] As used herein, an “RNAi agent” (also referred to as an “RNAi trigger”) means a chemical composition of matter that contains an RNA or RNA-like (e.g., chemically modified RNA) oligonucleotide molecule that is capable of degrading RNA or inhibiting (e.g., degrades or inhibits under appropriate conditions) translation of viral RNA (including viral RNA and viral mRNA messenger RNA (mRNA) transcripts) of a target coronavirus in a sequence specific manner. As used herein, RNAi agents may operate through the RNA interference mechanism (i.e., inducing RNA interference through interaction with the RNA interference pathway machinery (RNA-induced silencing complex or RISC) of mammalian cells), or by any alternative mechanism(s) or pathway(s). While it is believed that RNAi agents, as that term is used herein, operate primarily through the RNA interference mechanism, the disclosed RNAi agents are not bound by or limited to any particular pathway or mechanism of action. RNAi agents disclosed herein are comprised of a sense strand and an antisense strand, and include, but are not limited to: small (or short) interfering RNAs (siRNAs), double stranded RNAs (dsRNA), micro RNAs (miRNAs), short hairpin RNAs (shRNA), and dicer substrates. The antisense strand of the RNAi agents described herein is at least partially complementary to the RNA being targeted (e.g., SARS-CoV-2 RNA). RNAi agents can include one or more modified nucleotides and/or one or more non-phosphodiester linkages.

[0028] As used herein, the terms “silence,” “reduce,” “inhibit,” “down-regulate,” or “knockdown” when referring to expression of a given viral genome, mean that the expression of the viral genome (viral genomic RNA or subgenomic RNA), as measured by the level of RNA transcribed from the gene or genome, the number of viral genomes, or the level of polypeptide, protein, or protein subunit translated from the viral RNA in a cell, group of cells, tissue, organ, or subject in which the gene or viral genome is transcribed, is reduced when the cell, group of cells, tissue, organ, or subject is treated with the RNAi agents described herein as compared to a second cell, group of cells, tissue, organ, or subject that has not or have not been so treated. Without being bound to any particular theory, it is believed that the CoV RNAi agents disclosed herein utilize the RNA interference mechanism to inhibit CoV viral transcripts thereby leading to a reduction in viral genome expression.

[0029] As used herein, the terms “sequence” and “nucleotide sequence” mean a succession or order of nucleobases or nucleotides, described with a succession of letters using standard nomenclature.

[0030] As used herein, a “base,” “nucleotide base,” or “nucleobase,” is a heterocyclic pyrimidine or purine compound that is a component of a nucleotide, and includes the primary purine bases adenine and guanine, and the primary pyrimidine bases cytosine, thymine, and uracil. A nucleobase may further be modified to include, without limitation, universal bases, hydrophobic bases, promiscuous bases, size-expanded bases, and fluorinated bases. (See, e.g., Modified Nucleosides in Biochemistry, Biotechnology and Medicine, Herdewijn, P. ed. Wiley-VCH, 2008). The synthesis of such modified nucleobases (including phosphoramidite compounds that include modified nucleobases) is known in the art.

[0031] As used herein, and unless otherwise indicated, the term “complementary,” when used to describe a first nucleobase or nucleotide sequence (e.g., RNAi agent sense strand or targeted RNA) in relation to a second nucleobase or nucleotide sequence (e.g., RNAi agent antisense strand or a single-stranded antisense oligonucleotide), means the ability of an oligonucleotide or polynucleotide including the first nucleotide sequence to hybridize (form base pair hydrogen bonds under mammalian physiological conditions (or otherwise suitable in vivo or in vitro conditions)) and form a duplex or double helical structure under certain standard conditions with an oligonucleotide that includes the second nucleotide sequence. The person of ordinary skill in the art would be able to select the set of conditions most appropriate for a hybridization test. Complementary sequences include Watson-Crick base pairs or non-Watson-Crick base pairs and include natural or modified nucleotides or nucleotide mimics, at least to the extent that the above hybridization requirements are fulfilled. Sequence identity or complementarity is independent of modification. For example, a and Af, as defined herein, are complementary to U (or T) and identical to A for the purposes of determining identity or complementarity.

[0032] As used herein, “perfectly complementary” or “fully complementary” means that in a hybridized pair of nucleobase or nucleotide sequence molecules, all (100%) of the bases in a contiguous sequence of a first oligonucleotide will hybridize with the same number of bases in a contiguous sequence of a second oligonucleotide. The contiguous sequence may comprise all or a part of a first or second nucleotide sequence.

[0033] As used herein, “partially complementary” means that in a hybridized pair of nucleobase or nucleotide sequence molecules, at least 70%, but not all, of the bases in a contiguous sequence of a first oligonucleotide will hybridize with the same number of bases in a contiguous sequence of a second oligonucleotide. The contiguous sequence may comprise all or a part of a first or second nucleotide sequence.

[0034] As used herein, “substantially complementary” means that in a hybridized pair of nucleobase or nucleotide sequence molecules, at least 85%, but not all, of the bases in a contiguous sequence of a first oligonucleotide will hybridize with the same number of bases in a contiguous sequence of a second oligonucleotide. The contiguous sequence may comprise all or a part of a first or second nucleotide sequence.

[0035] As used herein, the terms “complementary,” “fully complementary,” “partially complementary,” and “substantially complementary” are used with respect to the nucleobase or nucleotide matching between the sense strand and the antisense strand of an RNAi agent, or between the antisense strand of an RNAi agent and a sequence of a CoV RNA, such as a SARS-CoV-2 RNA.

[0036] As used herein, the term “substantially identical” or “substantial identity,” as applied to a nucleic acid sequence means the nucleotide sequence (or a portion of a nucleotide sequence) has at least about 85% sequence identity or more, e.g., at least 90%, at least 95%, or at least 99% identity, compared to a reference sequence. Percentage of sequence identity is determined by comparing two optimally aligned sequences over a comparison window. The percentage is calculated by determining the number of positions at which the same type of nucleic acid base occurs in both sequences to yield the number of matched positions, dividing the number of matched positions by the total number of positions in the window of comparison and multiplying the result by 100 to yield the percentage of sequence identity. The inventions disclosed herein encompass nucleotide sequences substantially identical to those disclosed herein.

[0037] As used herein, the terms “treat,” “treatment,” and the like, mean the methods or steps taken to provide relief from or alleviation of the number, severity, and/or frequency of one or more symptoms of a disease in a subject. As used herein, “treat” and “treatment” may include the prevention, management, prophylactic treatment, and/or inhibition or reduction of the number, severity, and/or frequency of one or more symptoms of a disease in a subject.

[0038] As used herein, the phrases “symptoms and diseases associated with coronavirus infection” and a “coronavirus associate disease” refer to a symptom, disease, or disorder that is caused by or associated with a coronavirus infection. A “coronavirus infection” includes an infection with any coronavirus such as, for example, the two alpha-CoVs (HCoVs-NL63 and HCoVs-229E), the two beta-CoVs (HCoVs-OC43 and HCoVs-HKU1), severe acute respiratory syndrome-CoV (SARS-CoV), and Middle East respiratory syndrome-CoV (MERS-CoV). The symptoms of a coronavirus infection depend on the seriousness of the infection and the type of coronavirus.

[0039] As used herein, the phrase “introducing into a cell,” when referring to an RNAi agent, means functionally delivering the RNAi agent into a cell. The phrase “functional delivery,” means delivering the RNAi agent to the cell in a manner that enables the RNAi agent to have the expected biological activity, e.g., sequence-specific inhibition of gene or viral genome expression.

[0040] Unless stated otherwise, use of the symbol [symbol] as used herein means that any group or groups may be linked thereto that is in accordance with the scope of the inventions described herein.

[0041] As used herein, the term “isomers” refers to compounds that have identical molecular formulae, but that differ in the nature or the sequence of bonding of their atoms or in the arrangement of their atoms in space. Isomers that differ in the arrangement of their atoms in space are termed “stereoisomers.” Stereoisomers that are not mirror images of one another are termed “diastereoisomers,” and stereoisomers that are non-superimposable mirror images are termed “enantiomers,” or sometimes optical isomers. A carbon atom bonded to four non-identical substituents is termed a “chiral center.”

[0042] As used herein, unless specifically identified in a structure as having a particular conformation, for each structure in which asymmetric centers are present and thus give rise to enantiomers, diastereomers, or other stereoisomeric configurations, each structure disclosed herein is intended to represent all such possible isomers, including their optically pure and racemic forms. For example, the structures disclosed herein are intended to cover mixtures of diastereomers as well as single stereoisomers.

[0043] As used in a claim herein, the phrase “consisting of” excludes any element, step, or ingredient not specified in the claim. When used in a claim herein, the phrase “consisting essentially of” limits the scope of a claim to the specified materials or steps and those that do not materially affect the basic and novel characteristic(s) of the claimed invention.

[0044] The person of ordinary skill in the art would readily understand and appreciate that the compounds and compositions disclosed herein may have certain atoms (e.g., N, O, or S atoms) in a protonated or deprotonated state, depending upon the environment in which the compound or composition is placed. Accordingly, as used herein, the structures disclosed herein envisage that certain functional groups, such as, for example, OH, SH, or NH, may be protonated or deprotonated. The disclosure herein is intended to cover the disclosed compounds and compositions regardless of their state of protonation based on the environment (such as pH), as would be readily understood by the person of ordinary skill in the art. Correspondingly, compounds described herein with labile protons or basic atoms should also be understood to represent salt forms of the corresponding compound. The RNAi agents described herein may be in a free acid, free base, or salt form. Pharmaceutically acceptable salts of the RNAi agent compounds described herein should be understood to be within the scope of the invention.

[0045] As used herein, the term “linked” or “conjugated” when referring to the connection between two compounds or molecules means that two compounds or molecules are joined by a covalent bond. Unless stated, the terms “linked” and “conjugated” as used herein may refer to the connection between a first compound and a second compound either with or without any intervening atoms or groups of atoms.

[0046] As used herein, the term “including” is used to herein mean, and is used interchangeably with, the phrase “including but not limited to.” The term “or” is used herein to mean, and is used interchangeably with, the term “and/or,” unless the context clearly indicates otherwise.

[0047] Unless otherwise defined, all technical and scientific terms used herein have the same meaning as commonly understood by one of ordinary skill in the art. Although methods and materials similar or equivalent to those described herein can be used in the practice or testing of the present invention, suitable methods and materials are described below. All publications, patent applications, patents, and other references mentioned herein are incorporated by reference in their entirety. In case of conflict, the present specification, including definitions, will control. In addition, the materials, methods, and examples are illustrative only and not intended to be limiting.

[0048] Other objects, features, aspects, and advantages of the invention will be apparent from the following detailed description, accompanying figures, and from the claims.

### BRIEF DESCRIPTION OF THE DRAWINGS

[0049] FIG. 1. Chemical structure representation of the tridentate αvβ6 epithelial cell targeting ligand referred to herein as Tri-SM6.1-αvβ6-(TA14).

[0050] FIG. 2. Chemical structure representation of the peptide αvβ6 epithelial cell targeting ligand referred to herein as αvβ6-pep1.

[0051] FIG. 3. Graph plotting the reduction of CoV genomic viral RNA in lung tissue on Day 3 post infection (see also Example 10).

[0052] FIG. 4. Graph plotting the reduction of CoV subgenomic RNA in lung tissue on Day 3 post infection. (see also Example 10).

[0053] FIG. 5. Bar graph showing reduction of total inflammation of the superior lobe of the lung on Day 7 post infection (see also Example 10).

[0054] FIG. 6. Bar graph showing reduction of alveolar inflammation on Day 7 post infection (see also Example 10).

[0055] FIG. 7. Bar graph showing plaque-forming units (PFU) reduction on Day 3 post infection (see also Example 10).

[0056] FIG. 8. Line graph showing body weight restoration (see also Example 10).

[0057] FIG. 9. Pre-SARS-CoV-2 infection, % hamster body weight change (see also Example 13).

[0058] FIG. 10. Post-SARS-CoV-2 infection, % hamster body weight change (see also Example 13).

[0059] FIG. 11. Viral titers in lung tissue at days 3 and 7 post infection expressed in PFU/ml homogenized tissue. Dotted line indicates the limit of detection (LOD) of the assay of 10 PFU/ml (see also Example 13).

[0060] FIG. 12. Viral titers in lungs at days 3 and 7 post infection expressed as PFU/gram of lung tissue, normalized to the weight of the tissue. Dotted line indicates the limit of detection (LOD) of the assay of 10 PFU/gram (see also Example 13).

[0061] FIG. 13. Viral genomic RNA copies in lung homogenates at days 3 and 7 post infection, normalized to 100 mg of lung tissue (see also Example 13).

[0062] FIG. 14. Viral subgenomic RNA copies in the lung homogenates at days 3 and 7 post infection, normalized to 100 mg of lung tissue (see also Example 13).

[0063] FIG. 15A. Pre-SARS-CoV-2 infection, % body weight change: Body weight at day −7 was used to calculate % body weight gain/loss in the pre-infection phase (see also Example 14).

[0064] FIG. 15B. Post-SARS-CoV-2 infection, % body weight change: Body weight at day 0 was used to calculate % body weight gain/loss in post infection phase (see also Example 14).

[0065] FIG. 16A. Viral genomic RNA copies in the lung, 3 days post infection (see also Example 14).

[0066] FIG. 16B. Viral subgenomic RNA copies in the lung, 3 days post infection (see also Example 14).

[0067] FIG. 17A. Viral genomic RNA copies in the lung, 7 days post infection (see also Example 14).

[0068] FIG. 17B. Viral subgenomic RNA copies in the lung, 7 days post infection (see also Example 14).

[0069] FIG. 18A. Viral titers in lungs at day 3 post infection expressed in PFU/ml (see also Example 14).

[0070] FIG. 18B. Viral titers in lungs at day 3 post infection expressed in PFU/gram of lung tissue (see also Example 14).

[0071] FIG. 19A. Pre-SARS-CoV-2 infection, % body weight change: Body weight at day −7 was used to calculate % body weight gain/loss in the pre-infection phase (see also Example 14).

[0072] FIG. 19B. Post-SARS-CoV-2 infection, % body weight change: Body weight at day 0 was used to calculate % body weight gain/loss in post infection phase (see also Example 14).

[0073] FIG. 20A. Viral genomic RNA copies in the lung, 3 days post infection (see also Example 14).

[0074] FIG. 20B. Viral subgenomic RNA copies in the lung, 3 days post infection (see also Example 14).

[0075] FIG. 21A. Viral genomic RNA copies in the lung, 7 days post infection (see also Example 14).

[0076] FIG. 21B. Viral subgenomic RNA copies in the lung, 7 days post infection (see also Example 14).

[0077] FIG. 21C. Viral titers determined by plaque assay in PFU/ml, 3 days post infection (see also Example 14).

[0078] FIG. 21D. Viral titers normalized to the weight of the tissue and expressed as PFU/gram of lung tissue, 3 days post infection (see also Example 14).

[0079] FIG. 22A. Bar graph showing reduction of total inflammation of the superior lobe section of the lung on Day 7 post infection (see also Example 14).

[0080] FIG. 22B. Bar graph showing reduction of inflammation of the alveolar lung area of the superior lobe section of the lung on Day 7 post infection (see also Example 14).

[0081] FIG. 23A. H&E-stained superior lobe of the right lung of uninfected control group hamsters that were naïve or received saline vehicle, lungs collected 3 days post infection (see also Example 14).

[0082] FIG. 23B. H&E-stained superior lobe of the right lung of hamsters that received AC001927 or saline control, lungs collected 3 days post infection (see also Example 14).

[0083] FIG. 23C. H&E-stained superior lobe of the right lung of hamsters that received AC002617 or saline control, lungs collected 3 days post infection (see also Example 14).

[0084] FIG. 23D. H&E-stained superior lobe of the right lung of hamsters that received AC002618 or saline control, lungs collected 3 days post infection (see also Example 14).

[0085] FIG. 23E. H&E-stained superior lobe of the right lung of hamsters that received AC002620 or saline control, lungs collected 3 days post infection (see also Example 14).

[0086] FIG. 23F. H&E-stained superior lobe of the right lung of hamsters that received AC002621 or saline control, lungs collected 3 days post infection (see also Example 14).

[0087] FIG. 24A. H&E-stained superior lobe of the right lung of hamsters that received AC001927 or saline control, lungs collected 7 days post infection (see also Example 14).

[0088] FIG. 24B. H&E-stained superior lobe of the right lung of hamsters that received AC002617 or saline control, lungs collected 7 days post infection (see also Example 14).

[0089] FIG. 24C. H&E-stained superior lobe of the right lung of hamsters that received AC002618 or saline control, lungs collected 7 days post infection (see also Example 14).

[0090] FIG. 24D. H&E-stained superior lobe of the right lung of hamsters that received AC002620 or saline control, lungs collected 7 days post infection (see also Example 14).

[0091] FIG. 24E. H&E-stained superior lobe of the right lung of hamsters that received AC002621 or saline control, lungs collected 7 days post infection (see also Example 14).

[0092] FIG. 25A. Group average hamster body weights (g) pre- and post-SARS-CoV-2 infection (see also Example 15).

[0093] FIG. 25B. Total pulmonary inflammation area of the experimental groups treated with the CoV RNAi agents (see also Example 15).

[0094] FIG. 25C. Viral genomic RNA copies in the lung, 3 days post infection (see also Example 15).

[0095] FIG. 25D. Viral subgenomic RNA copies in the lung, 3 days post infection (see also Example 15).

[0096] FIG. 25E. Viral genomic RNA copies in the lung, 7 days post infection (see also Example 15).

[0097] FIG. 25F. Viral subgenomic RNA copies in the lung, 7 days post infection (see also Example 15).

### DETAILED DESCRIPTION

### RNAi Agents

[0098] Described herein are RNAi agents for inhibiting expression of a CoV viral genome, including but not limited to SARS-CoV-2 (referred to herein as CoV RNAi agents or CoV RNAi triggers). Each CoV RNAi agent disclosed herein comprises a sense strand and an antisense strand. The sense strand can be 15 to 49 nucleotides in length, and the antisense strand can be 18 to 49 nucleotides in length. The sense and antisense strands can be either the same length or they can be different lengths. In some embodiments, the sense and antisense strands are each independently 18 to 27 nucleotides in length. In some embodiments, both the sense and antisense strands are each 19-26 nucleotides in length. In some embodiments, the sense and antisense strands are each 21-24 nucleotides in length. In some embodiments, the sense and antisense strands are each independently 19-21 nucleotides in length. In some embodiments, the sense strand is about 19 nucleotides in length while the antisense strand is about 21 nucleotides in length. In some embodiments, the sense strand is about 21 nucleotides in length while the antisense strand is about 23 nucleotides in length. In some embodiments, a sense strand is 23 nucleotides in length and an antisense strand is 21 nucleotides in length. In some embodiments, both the sense and antisense strands are each 21 nucleotides in length. In some embodiments, the RNAi agent sense strands are 15, 16, 17, 18, 19, 20, 21, 22, 23, 24, 25, 26, 27, 28, 29, 30, 31, 32, 33, 34, 35, 36, 37, 38, or 39 nucleotides in length. In some embodiments, the RNAi agent antisense strands are 18, 19, 20, 21, 22, 23, 24, 25, 26, 27, 28, 29, 30, 31, 32, 33, 34, 35, 36, 37, 38, or 39 nucleotides in length. In some embodiments, a double-stranded RNAi agent has a duplex length of about 16, 17, 18, 19, 20, 21, 22, 23 or 24 nucleotides.

[0099] Examples of nucleotide sequences used in forming CoV RNAi agents are provided in Tables 2, 3, 4, 5, 6, and 10. Examples of RNAi agent duplexes, that include the sense strand and antisense strand sequences in Tables 2, 3, 4, 5, 6, are shown in Tables 7A, 7B, 8, 9, and 10.

[0100] In some embodiments, the region of perfect, substantial, or partial complementarity between the sense strand and the antisense strand is 15-26 (e.g., 15, 16, 17, 18, 19, 20, 21, 22, 23, 24, 25, or 26) nucleotides in length and occurs at or near the 5′ end of the antisense strand (e.g., this region may be separated from the 5′ end of the antisense strand by 0, 1, 2, 3, or 4 nucleotides that are not perfectly, substantially, or partially complementary).

[0101] A sense strand of the CoV RNAi agents described herein includes at least 15 consecutive nucleotides that have at least 85% identity to a core stretch sequence (also referred to herein as a “core stretch” or “core sequence”) of the same number of nucleotides in a SARS-CoV-2 RNA (including all viral RNA as well as viral mRNA). In some embodiments, a sense strand core stretch sequence is 100% (perfectly) complementary or at least about 85% (substantially) complementary to a core stretch sequence in the antisense strand, and thus the sense strand core stretch sequence is typically perfectly identical or at least about 85% identical to a nucleotide sequence of the same length (sometimes referred to, e.g., as a target sequence) present in the SARS-CoV-2 RNA target, which as noted elsewhere is a target sequence that is known to be conserved across a variety of coronaviruses. In some embodiments, this sense strand core stretch is 15, 16, 17, 18, 19, 20, 21, 22, or 23 nucleotides in length. In some embodiments, this sense strand core stretch is 17 nucleotides in length. In some embodiments, this sense strand core stretch is 19 nucleotides in length.

[0102] An antisense strand of a CoV RNAi agent described herein includes at least 17 consecutive nucleotides that have at least 85% complementarity to a core stretch of the same number of nucleotides in a SARS-CoV-2 RNA or another CoV RNA being targeted, and at least 15 consecutive nucleotides that have at least 85% complementarity to a core stretch of the same number of nucleotides to a core stretch of the same number of nucleotides in the corresponding sense strand. In some embodiments, an antisense strand core stretch is 100% (perfectly) complementary or at least about 85% (substantially) complementary to a nucleotide sequence (e.g., target sequence) of the same length present in a SARS-CoV-2 RNA target. In some embodiments, this antisense strand core stretch is 15, 16, 17, 18, 19, 20, 21, 22, or 23 nucleotides in length. In some embodiments, this antisense strand core stretch is 19 nucleotides in length. In some embodiments, this antisense strand core stretch is 17 nucleotides in length. A sense strand core stretch sequence can be the same length as a corresponding antisense core sequence or it can be a different length.

[0103] The CoV RNAi agent sense and antisense strands anneal to form a duplex. A sense strand and an antisense strand of a CoV RNAi agent can be partially, substantially, or fully complementary to each other. Within the complementary duplex region, the sense strand core stretch sequence is at least 85% complementary or 100% complementary to the antisense core stretch sequence. In some embodiments, the sense strand core stretch sequence contains a sequence of at least 15, at least 16, at least 17, at least 18, at least 19, at least 20, at least 21, at least 22, or at least 23 nucleotides that is at least 85% or 100% complementary to a corresponding 15, 16, 17, 18, 19, 20, 21, 22, or 23 nucleotide sequence of the antisense strand core stretch sequence (i.e., the sense and antisense core stretch sequences of a CoV RNAi agent have a region of at least 15, at least 16, at least 17, at least 18, at least 19, at least 20, at least 21, at least 22, or at least 23 nucleotides that is at least 85% base paired or 100% base paired.)

[0104] In some embodiments, the antisense strand of a CoV RNAi agent disclosed herein differs by 0, 1, 2, or 3 nucleotides from any of the antisense strand sequences in Table 2 or Table 3. In some embodiments, the sense strand of a CoV RNAi agent disclosed herein differs by 0, 1, 2, or 3 nucleotides from any of the sense strand sequences in Table 2, Table 4, Table 5, Table 6, or Table 10.

[0105] In some embodiments, the sense strand and/or the antisense strand can optionally and independently contain an additional 1, 2, 3, 4, 5, or 6 nucleotides (extension) at the 3′ end, the 5′ end, or both the 3′ and 5′ ends of the core stretch sequences. The antisense strand additional nucleotides, if present, may or may not be complementary to the corresponding sequence in a SARS-CoV-2 RNA. The sense strand additional nucleotides, if present, may or may not be identical to the corresponding sequence in a SARS-CoV-2 RNA. The antisense strand additional nucleotides, if present, may or may not be complementary to the corresponding sense strand's additional nucleotides, if present.

[0106] As used herein, an extension comprises 1, 2, 3, 4, 5, or 6 nucleotides at the 5′ and/or 3′ end of the sense strand core stretch sequence and/or antisense strand core stretch sequence. The extension nucleotides on a sense strand may or may not be complementary to nucleotides, either core stretch sequence nucleotides or extension nucleotides, in the corresponding antisense strand. Conversely, the extension nucleotides on an antisense strand may or may not be complementary to nucleotides, either core stretch nucleotides or extension nucleotides, in the corresponding sense strand. In some embodiments, both the sense strand and the antisense strand of an RNAi agent contain 3′ and 5′ extensions. In some embodiments, one or more of the 3′ extension nucleotides of one strand base pairs with one or more 5′ extension nucleotides of the other strand. In other embodiments, one or more of 3′ extension nucleotides of one strand do not base pair with one or more 5′ extension nucleotides of the other strand. In some embodiments, a CoV RNAi agent has an antisense strand having a 3′ extension and a sense strand having a 5′ extension. In some embodiments, the extension nucleotide(s) are unpaired and form an overhang. As used herein, an “overhang” refers to a stretch of one or more unpaired nucleotides located at a terminal end of either the sense strand or the antisense strand that does not form part of the hybridized or duplexed portion of an RNAi agent disclosed herein.

[0107] In some embodiments, a CoV RNAi agent comprises an antisense strand having a 3′ extension of 1, 2, 3, 4, 5, or 6 nucleotides in length. In other embodiments, a CoV RNAi agent comprises an antisense strand having a 3′ extension of 1, 2, or 3 nucleotides in length. In some embodiments, one or more of the antisense strand extension nucleotides comprise nucleotides that are complementary to the corresponding SARS-CoV-2 RNA sequence. In some embodiments, one or more of the antisense strand extension nucleotides comprise nucleotides that are not complementary to the corresponding SARS-CoV-2 RNA sequence.

[0108] In some embodiments, a CoV RNAi agent comprises a sense strand having a 3′ extension of 1, 2, 3, 4, or 5 nucleotides in length. In some embodiments, one or more of the sense strand extension nucleotides comprises adenosine, uracil, or thymidine nucleotides, AT dinucleotide, or nucleotides that correspond to or are the identical to nucleotides in a SARS-CoV-2 RNA sequence. In some embodiments, the 3′ sense strand extension includes or consists of one of the following sequences, but is not limited to: T, UT, TT, UU, UUT, TTT, or TTTT (each listed 5′ to 3′).

[0109] A sense strand can have a 3′ extension and/or a 5′ extension. In some embodiments, a CoV RNAi agent comprises a sense strand having a 5′ extension of 1, 2, 3, 4, 5, or 6 nucleotides in length. In some embodiments, one or more of the sense strand extension nucleotides comprise nucleotides that correspond to or are identical to nucleotides in a SARS-CoV-2 RNA sequence.

[0110] Examples of sequences used in forming CoV RNAi agents are provided in Tables 2, 3, 4, 5, 6, and 10. In some embodiments, a CoV RNAi agent antisense strand includes a sequence of any of the sequences in Tables 2, 3, or 10. In certain embodiments, a CoV RNAi agent antisense strand comprises or consists of any one of the modified sequences in Table 3. In some embodiments, a CoV RNAi agent antisense strand includes the sequence of nucleotides (from 5′ end→3′ end) 1-17, 2-15, 2-17, 1-18, 2-18, 1-19, 2-19, 1-20, 2-20, 1-21, or 2-21, of any of the sequences in Tables 2 or 3. In some embodiments, a CoV RNAi agent sense strand includes the sequence of any of the sequences in Tables 2, 4, 5, or 6. In some embodiments, a CoV RNAi agent sense strand includes the sequence of nucleotides (from 5′ end→3′ end) 1-18, 1-19, 1-20, 1-21, 2-19, 2-20, 2-21, 3-20, 3-21, or 4-21 of any of the sequences in Tables 2, 4, 5, or 6. In certain embodiments, a CoV RNAi agent sense strand comprises or consists of a modified sequence of any one of the modified sequences in Table 4, 5, 6, or 10.

[0111] In some embodiments, the sense and antisense strands of the RNAi agents described herein contain the same number of nucleotides. In some embodiments, the sense and antisense strands of the RNAi agents described herein contain different numbers of nucleotides. In some embodiments, the sense strand 5′ end and the antisense strand 3′ end of an RNAi agent form a blunt end. In some embodiments, the sense strand 3′ end and the antisense strand 5′ end of an RNAi agent form a blunt end. In some embodiments, both ends of an RNAi agent form blunt ends. In some embodiments, neither end of an RNAi agent is blunt-ended. As used herein a “blunt end” refers to an end of a double stranded RNAi agent in which the terminal nucleotides of the two annealed strands are complementary (form a complementary base-pair).

[0112] In some embodiments, the sense strand 5′ end and the antisense strand 3′ end of an RNAi agent form a frayed end. In some embodiments, the sense strand 3′ end and the antisense strand 5′ end of an RNAi agent form a frayed end. In some embodiments, both ends of an RNAi agent form a frayed end. In some embodiments, neither end of an RNAi agent is a frayed end. As used herein a frayed end refers to an end of a double stranded RNAi agent in which the terminal nucleotides of the two annealed strands form a pair (i.e., do not form an overhang) but are not complementary (i.e. form a non-complementary pair). In some embodiments, one or more unpaired nucleotides at the end of one strand of a double stranded RNAi agent form an overhang. The unpaired nucleotides may be on the sense strand or the antisense strand, creating either 3′ or 5′ overhangs. In some embodiments, the RNAi agent contains: a blunt end and a frayed end, a blunt end and 5′ overhang end, a blunt end and a 3′ overhang end, a frayed end and a 5′ overhang end, a frayed end and a 3′ overhang end, two 5′ overhang ends, two 3′ overhang ends, a 5′ overhang end and a 3′ overhang end, two frayed ends, or two blunt ends. Typically, when present, overhangs are located at the 3′ terminal ends of the sense strand, the antisense strand, or both the sense strand and the antisense strand.

[0113] The CoV RNAi agents disclosed herein may also be comprised of one or more modified nucleotides. In some embodiments, substantially all of the nucleotides of the sense strand and substantially all of the nucleotides of the antisense strand of the CoV RNAi agent are modified nucleotides. The CoV RNAi agents disclosed herein may further be comprised of one or more modified internucleoside linkages, e.g., one or more phosphorothioate or phosphorodithioate linkages. In some embodiments, a CoV RNAi agent contains one or more modified nucleotides and one or more modified internucleoside linkages. In some embodiments, a 2′-modified nucleotide is combined with modified internucleoside linkage.

[0114] In some embodiments, a CoV RNAi agent is prepared or provided as a salt, mixed salt, or a free-acid. In some embodiments, a CoV RNAi agent is prepared as a pharmaceutically acceptable salt. In some embodiments, a CoV RNAi agent is prepared as a pharmaceutically acceptable sodium salt. Such forms that are well known in the art are within the scope of the inventions disclosed herein.

### Modified Nucleotides

[0115] Modified nucleotides, when used in various oligonucleotide constructs, can preserve activity of the compound in cells while at the same time increasing the serum stability of these compounds, and can also minimize the possibility of activating interferon activity in humans upon administration of the oligonucleotide construct.

[0116] In some embodiments, a CoV RNAi agent contains one or more modified nucleotides. As used herein, a “modified nucleotide” is a nucleotide other than a ribonucleotide (2′-hydroxyl nucleotide). In some embodiments, at least 50% (e.g., at least 60%, at least 70%, at least 80%, at least 90%, at least 95%, at least 97%, at least 98%, at least 99%, or 100%) of the nucleotides are modified nucleotides. As used herein, modified nucleotides can include, but are not limited to, deoxyribonucleotides, nucleotide mimics, abasic nucleotides, 2′-modified nucleotides, inverted nucleotides, modified nucleobase-comprising nucleotides, bridged nucleotides, peptide nucleic acids (PNAs), 2′,3′-seco nucleotide mimics (unlocked nucleobase analogues), locked nucleotides, 3′-O-methoxy (2′ internucleoside linked) nucleotides, 2′-F-Arabino nucleotides, 5′-Me, 2′-fluoro nucleotide, morpholino nucleotides, vinyl phosphonate deoxyribonucleotides, vinyl phosphonate containing nucleotides, and cyclopropyl phosphonate containing nucleotides. 2′-modified nucleotides (i.e., a nucleotide with a group other than a hydroxyl group at the 2′ position of the five-membered sugar ring) include, but are not limited to, 2′-O-methyl nucleotides (also referred to as 2′-methoxy nucleotides), 2′-fluoro nucleotides (also referred to herein as 2′-deoxy-2′-fluoro nucleotides), 2′-deoxy nucleotides, 2′-methoxyethyl (2′-O-2-methoxylethyl) nucleotides (also referred to as 2′-MOE), 2′-amino nucleotides, and 2′-alkyl nucleotides. It is not necessary for all positions in a given compound to be uniformly modified. Conversely, more than one modification can be incorporated in a single CoV RNAi agent or even in a single nucleotide thereof. The CoV RNAi agent sense strands and antisense strands can be synthesized and/or modified by methods known in the art. Modification at one nucleotide is independent of modification at another nucleotide.

[0117] Modified nucleobases include synthetic and natural nucleobases, such as 5-substituted pyrimidines, 6-azapyrimidines and N-2, N-6 and 0-6 substituted purines, (e.g., 2-aminopropyladenine, 5-propynyluracil, or 5-propynylcytosine), 5-methylcytosine (5-me-C), 5-hydroxymethyl cytosine, inosine, xanthine, hypoxanthine, 2-aminoadenine, 6-alkyl (e.g., 6-methyl, 6-ethyl, 6-isopropyl, or 6-n-butyl) derivatives of adenine and guanine, 2-alkyl (e.g., 2-methyl, 2-ethyl, 2-isopropyl, or 2-n-butyl) and other alkyl derivatives of adenine and guanine, 2-thiouracil, 2-thiothymine, 2-thiocytosine, 5-halouracil, cytosine, 5-propynyl uracil, 5-propynyl cytosine, 6-azo uracil, 6-azo cytosine, 6-azo thymine, 5-uracil (pseudouracil), 4-thiouracil, 8-halo, 8-amino, 8-sulflydryl, 8-thioalkyl, 8-hydroxyl and other 8-substituted adenines and guanines, 5-halo (e.g., 5-bromo), 5-trifluoromethyl, and other 5-substituted uracils and cytosines, 7-methylguanine and 7-methyladenine, 8-azaguanine and 8-azaadenine, 7-deazaguanine, 7-deazaadenine, 3-deazaguanine, and 3-deazaadenine.

[0118] In some embodiments, the 5′ and/or 3′ end of the antisense strand can include abasic residues (Ab), which can also be referred to as an “abasic site” or “abasic nucleotide.” An abasic residue (Ab) is a nucleotide or nucleoside that lacks a nucleobase at the 1′ position of the sugar moiety. (See, e.g., U.S. Pat. No. 5,998,203). In some embodiments, an abasic residue can be placed internally in a nucleotide sequence. In some embodiments, Ab or AbAb can be added to the 3′ end of the antisense strand. In some embodiments, the 5′ end of the sense strand can include one or more additional abasic residues (e.g., (Ab) or (AbAb)). In some embodiments, UUAb, UAb, or Ab are added to the 3′ end of the sense strand. In some embodiments, an abasic (deoxyribose) residue can be replaced with a ribitol (abasic ribose) residue.

[0119] In some embodiments, all or substantially all of the nucleotides of an RNAi agent are modified nucleotides. As used herein, an RNAi agent wherein substantially all of the nucleotides present are modified nucleotides is an RNAi agent having four or fewer (i.e., 0, 1, 2, 3, or 4) nucleotides in both the sense strand and the antisense strand being ribonucleotides (i.e., unmodified). As used herein, a sense strand wherein substantially all of the nucleotides present are modified nucleotides is a sense strand having two or fewer (i.e., 0, 1, or 2) nucleotides in the sense strand being unmodified ribonucleotides. As used herein, an antisense strand wherein substantially all of the nucleotides present are modified nucleotides is an antisense strand having two or fewer (i.e., 0, 1, or 2) nucleotides in the antisense strand being unmodified ribonucleotides. In some embodiments, one or more nucleotides of an RNAi agent is an unmodified ribonucleotide. Chemical structures for certain modified nucleotides are set forth in Table 11 herein.

### Modified Internucleoside Linkages

[0120] In some embodiments, one or more nucleotides of a CoV RNAi agent are linked by non-standard linkages or backbones (i.e., modified intemucleoside linkages or modified backbones). Modified intemucleoside linkages or backbones include, but are not limited to, phosphorothioate groups (represented herein as a lower case “s”), chiral phosphorothioates, thiophosphates, phosphorodithioates, phosphotriesters, aminoalkyl-phosphotriesters, alkyl phosphonates (e.g., methyl phosphonates or 3′-alkylene phosphonates), chiral phosphonates, phosphinates, phosphoramidates (e.g., 3′-amino phosphoramidate, aminoalkylphosphoramidates, or thionophosphoramidates), thionoalkyl-phosphonates, thionoalkylphosphotriesters, morpholino linkages, boranophosphates having normal 3′-5′ linkages, 2′-5′ linked analogs of boranophosphates, or boranophosphates having inverted polarity wherein the adjacent pairs of nucleoside units are linked 3′-5′ to 5′-3′ or 2′-5′ to 5′-2′. In some embodiments, a modified intemucleoside linkage or backbone lacks a phosphorus atom. Modified intemucleoside linkages lacking a phosphorus atom include, but are not limited to, short chain alkyl or cycloalkyl inter-sugar linkages, mixed heteroatom and alkyl or cycloalkyl inter-sugar linkages, or one or more short chain heteroatomic or heterocyclic inter-sugar linkages. In some embodiments, modified intemucleoside backbones include, but are not limited to, siloxane backbones, sulfide backbones, sulfoxide backbones, sulfone backbones, formacetyl and thioformacetyl backbones, methylene formacetyl and thioformacetyl backbones, alkene-containing backbones, sulfamate backbones, methyleneimino and methylenehydrazino backbones, sulfonate and sulfonamide backbones, amide backbones, and other backbones having mixed N, O, S, and CH2 components.

[0121] In some embodiments, a sense strand of a CoV RNAi agent can contain 1, 2, 3, 4, 5, or 6 phosphorothioate linkages, an antisense strand of a CoV RNAi agent can contain 1, 2, 3, 4, 5, or 6 phosphorothioate linkages, or both the sense strand and the antisense strand independently can contain 1, 2, 3, 4, 5, or 6 phosphorothioate linkages. In some embodiments, a sense strand of a CoV RNAi agent can contain 1, 2, 3, or 4 phosphorothioate linkages, an antisense strand of a CoV RNAi agent can contain 1, 2, 3, or 4 phosphorothioate linkages, or both the sense strand and the antisense strand independently can contain 1, 2, 3, or 4 phosphorothioate linkages.

[0122] In some embodiments, a CoV RNAi agent sense strand contains at least two phosphorothioate intemucleoside linkages. In some embodiments, the phosphorothioate intemucleoside linkages are between the nucleotides at positions 1-3 from the 3′ end of the sense strand. In some embodiments, one phosphorothioate intemucleoside linkage is at the 5′ end of the sense strand nucleotide sequence, and another phosphorothioate linkage is at the 3′ end of the sense strand nucleotide sequence. In some embodiments, two phosphorothioate intemucleoside linkage are located at the 5′ end of the sense strand, and another phosphorothioate linkage is at the 3′ end of the sense strand. In some embodiments, the sense strand does not include any phosphorothioate intemucleoside linkages between the nucleotides, but contains one, two, or three phosphorothioate linkages between the terminal nucleotides on both the 5′ and 3′ ends and the optionally present inverted abasic residue terminal caps. In some embodiments, the targeting ligand is linked to the sense strand via a phosphorothioate linkage.

[0123] In some embodiments, a CoV RNAi agent antisense strand contains four phosphorothioate intemucleoside linkages. In some embodiments, the four phosphorothioate intemucleoside linkages are between the nucleotides at positions 1-3 from the 5′ end of the antisense strand and between the nucleotides at positions 19-21, 20-22, 21-23, 22-24, 23-25, or 24-26 from the 5′ end. In some embodiments, three phosphorothioate intemucleoside linkages are located between positions 1-4 from the 5′ end of the antisense strand, and a fourth phosphorothioate intemucleoside linkage is located between positions 20-21 from the 5′ end of the antisense strand. In some embodiments, a CoV RNAi agent contains at least three or four phosphorothioate intemucleoside linkages in the antisense strand.

### Capping Residues or Moieties

[0124] In some embodiments, the sense strand may include one or more capping residues or moieties, sometimes referred to in the art as a “cap,” a “terminal cap,” or a “capping residue.” As used herein, a “capping residue” is a non-nucleotide compound or other moiety that can be incorporated at one or more termini of a nucleotide sequence of an RNAi agent disclosed herein. A capping residue can provide the RNAi agent, in some instances, with certain beneficial properties, such as, for example, protection against exonuclease degradation. In some embodiments, inverted abasic residues (invAb) (also referred to in the art as “inverted abasic sites”) are added as capping residues (see Table 11). (See, e.g., F. Czauderna, Nucleic Acids Res., 2003, 31(11), 2705-16). Capping residues are generally known in the art, and include, for example, inverted abasic residues as well as carbon chains such as a terminal C₃H₇ (propyl), C₆H₁₃ (hexyl), or C₁₂H₂₅ (dodecyl) groups. In some embodiments, a capping residue is present at either the 5′ terminal end, the 3′ terminal end, or both the 5′ and 3′ terminal ends of the sense strand. In some embodiments, the 5′ end and/or the 3′ end of the sense strand may include more than one inverted abasic deoxyribose moiety as a capping residue.

[0125] In some embodiments, one or more inverted abasic residues (invAb) are added to the 3′ end of the sense strand. In some embodiments, one or more inverted abasic residues (invAb) are added to the 5′ end of the sense strand. In some embodiments, one or more inverted abasic residues or inverted abasic sites are inserted between the targeting ligand and the nucleotide sequence of the sense strand of the RNAi agent. In some embodiments, the inclusion of one or more inverted abasic residues or inverted abasic sites at or near the terminal end or terminal ends of the sense strand of an RNAi agent allows for enhanced activity or other desired properties of an RNAi agent.

[0126] In some embodiments, one or more inverted abasic residues (invAb) are added to the 5′ end of the sense strand. In some embodiments, one or more inverted abasic residues can be inserted between the targeting ligand and the nucleotide sequence of the sense strand of the RNAi agent. The inverted abasic residues may be linked via phosphate, phosphorothioate (e.g., shown herein as (invAb)s)), or other internucleoside linkages. In some embodiments, the inclusion of one or more inverted abasic residues at or near the terminal end or terminal ends of the sense strand of an RNAi agent may allow for enhanced activity or other desired properties of an RNAi agent. In some embodiments, an inverted abasic (deoxyribose) residue can be replaced with an inverted ribitol (abasic ribose) residue. In some embodiments, the 3′ end of the antisense strand core stretch sequence, or the 3′ end of the antisense strand sequence, may include an inverted abasic residue. The chemical structures for inverted abasic deoxyribose residues are shown in Table 11 below.

### CoV RNAi Agents

[0127] The CoV RNAi agents disclosed herein are designed to target specific positions on a SARS-CoV-2 viral genome (e.g., SEQ ID NO:1 (NC_045512.2), and these specific targeted positions were selected because they also had sequences believed to be conserved across various other CoV genomes. As defined herein, an antisense strand sequence is designed to target a SARS-CoV-2 viral genome at a given position on the genome when the 5′ terminal nucleobase of the antisense strand is aligned with a position that is 21 nucleotides downstream (towards the 3′ end) from the position on the genome when base pairing to the gene or viral genome. For example, as illustrated in Tables 1 and 2 herein, an antisense strand sequence designed to target a SARS-CoV-2 genome at position 29150 requires that when base pairing to the genome, the 5′ terminal nucleobase of the antisense strand is aligned with position 29170 of a SARS-CoV-2 genome.

[0128] As provided herein, a CoV RNAi agent does not require that the nucleobase at position 1 (5′→3′) of the antisense strand be complementary to the viral genome, provided that there is at least 85% complementarity (e.g., at least 85, 86, 87, 88, 89, 90, 91, 92, 93, 94, 95, 96, 97, 98, 99, or 100% complementarity) of the antisense strand and the viral genome across a core stretch sequence of at least 17 consecutive nucleotides. For example, for a CoV RNAi agent disclosed herein that is designed to target position 29150 of a SARS-CoV-2 viral genome, the 5′ terminal nucleobase of the antisense strand of the of the CoV RNAi agent must be aligned with position 29170 of the genome; however, the 5′ terminal nucleobase of the antisense strand may be, but is not required to be, complementary to position 29170 of a SARS-CoV-2 viral genome, provided that there is at least 85% complementarity (e.g., at least 85, 86, 87, 88, 89, 90, 91, 92, 93, 94, 95, 96, 97, 98, 99, or 100% complementarity) of the antisense strand and the viral genome transcript across a core stretch sequence of at least 17 consecutive nucleotides. As shown by, among other things, the various examples disclosed herein, the specific site of binding of the genome by the antisense strand of the CoV RNAi agent (e.g., whether the CoV RNAi agent is designed to target a SARS-CoV-2 viral genome at position 29150, at position 4156, at position 6412, at position 4917, or at some other position) is an important factor to the level of inhibition achieved by the CoV RNAi agent. (See, e.g., Kamola et al., The siRNA Non-seed Region and Its Target Sequences are Auxiliary Determinants of Off-Target Effects, PLOS Computational Biology, 11(12), FIG. 1 (2015)).

[0129] In some embodiments, the CoV RNAi agents disclosed herein target a SARS-CoV-2 viral genome at or near the positions of the SARS-CoV-2 sequence shown in Table 1. In some embodiments, the antisense strand of a CoV RNAi agent disclosed herein includes a core stretch sequence that is fully, substantially, or at least partially complementary to a target SARS-CoV-2 19-mer sequence disclosed in Table 1.

TABLE 1
SARS-CoV-2 19-mer Target Sequences (taken from severe acute respiratory
syndrome coronavirus 2 isolate Wuhan-Hu-1, complete genome (NC_045512.2)
(SEQ ID NO: 1))

| | | | Targeted Viral |
|---|---|---|---|
| | SARS-CoV-2 19-mer | Corresponding | Genome Position |
| SEQ ID | Target Sequences | Positions of Sequence | (as referred to |
| No. | (5′→3') | on SEQ ID NO: 1 | herein) |
| 2 | CACACGUCCAACUCAGUUU | 300-318 | 298 |
| 3 | UUCUUAAGAGUGCUUAUGA | 3654-3672 | 3652 |
| 4 | UCUUAAGAGUGCUUAUGAA | 3655-1673 | 3653 |
| 5 | AUUAAUGGCAAUCUUCAUC | 4040-4058 | 4038 |
| 6 | CUGUGGUUAUACCUACUAA | 4158-4176 | 4156 |
| 7 | ACCUUUGACAAUCUUAAGA | 4919-4937 | 4917 |
| 8 | CAAUCUUAAGACACUUCUU | 4927-4945 | 4925 |
| 9 | AAUCUUAAGACACUUCUUU | 4928-4946 | 4926 |
| 10 | UGGGCACACUUUCUUAUGA | 5577-5595 | 5575 |
| 11 | AGAAAUUGACCCUAAGUUG | 5935-5953 | 5933 |
| 12 | AAGAAGUAGUGGAAAAUCC | 6411-6429 | 6409 |
| 13 | AAGUAGUGGAAAAUCCUAC | 6414-6432 | 6412 |
| 14 | UGCUUACGUUAAUACGUUU | 8041-8059 | 8039 |
| 15 | UAGACAAUGUCUUAUCUAC | 8142-8160 | 8140 |
| 16 | CAUGUGGUAGUGUUGGUUU | 10485-10503 | 10483 |
| 17 | UUUUGAUGUUGUUAGACAA | 10933-10951 | 10931 |
| 18 | GUAAUGCUUUAGAUCAAGC | 11436-11454 | 11434 |
| 19 | AGCUAUGACCCAAAUGUAU | 12286-12304 | 12284 |
| 20 | CAUGGUACCACAUAUAUCA | 13767-13785 | 13765 |
| 21 | AUGGUACCACAUAUAUCAC | 13768-13786 | 13766 |
| 22 | ACUGACAUUAGAUAAUCAA | 14052-14070 | 14050 |
| 23 | UACAUAAUCAGGAUGUAAA | 14501-14519 | 14499 |
| 24 | AUAAUCAGGAUGUAAACUU | 14504-14522 | 14502 |
| 25 | UAAUCAGGAUGUAAACUUA | 14505-14523 | 14503 |
| 26 | AUGUAAACUUACAUAGCUC | 14513-14531 | 14511 |
| 27 | UAAGGCUAGACUUUAUUAU | 14970-14988 | 14968 |
| 28 | GUGUCUCUAUCUGUAGUAC | 15116-15134 | 15114 |
| 29 | CUCUAUCUGUAGUACUAUG | 15120-15138 | 15118 |
| 30 | UCUAUCUGUAGUACUAUGA | 15121-15139 | 15119 |
| 31 | UAUCUGUAGUACUAUGACC | 15123-15141 | 15121 |
| 32 | AUACAAUGCUAGUUAAACA | 15887-15905 | 15885 |
| 33 | UACAAUGCUAGUUAAACAG | 15888-15906 | 15886 |
| 34 | CUAGCAAUGUUGCAAAUUA | 17024-17042 | 17022 |
| 35 | GCAUAAUGUCUGAUAGAGA | 17957-17975 | 17955 |
| 36 | AGACUCAUCUCUAUGAUGG | 18196-18214 | 18194 |
| 37 | GGAGUCACAUUAAUUGGAG | 20110-20128 | 20108 |
| 38 | UCGAUUCAGAUCUUAAUGA | 20945-20963 | 20943 |
| 39 | AUGAGUACGAACUUAUGUA | 26231-26249 | 26229 |
| 40 | GAACUUAUGUACUCAUUCG | 26239-26257 | 26237 |
| 41 | AACUUAUGUACUCAUUCGU | 26240-26258 | 26238 |
| 42 | UAUGUACUCAUUCGUUUCG | 26244-26262 | 26242 |
| 43 | AGUUAAUAGCGUACUUCUU | 26283-26301 | 26281 |
| 44 | UUGCUUUCGUGGUAUUCUU | 26306-26324 | 26304 |
| 45 | ACACUAGCCAUCCUUACUG | 26332-26350 | 26330 |
| 46 | ACUGCUGCAAUAUUGUUAA | 26369-26387 | 26367 |
| 47 | GCUGCAAUAUUGUUAACGU | 26372-26390 | 26370 |
| 48 | CUGCAAUAUUGUUAACGUG | 26373-26391 | 26371 |
| 49 | UGAUCUUCUGGUCUAAACG | 26457-26475 | 26455 |
| 50 | UCACGAACGCUUUCUUAUU | 27039-27057 | 27037 |
| 51 | AACGCUUUCUUAUUACAAA | 27044-27062 | 27042 |
| 52 | CAGUAAGUGACAACAGAUG | 27186-27204 | 27184 |
| 53 | GUAAGUGACAACAGAUGUU | 27188-27206 | 27186 |
| 54 | AGGAAGACCUUAAAUUCCC | 28455-28473 | 28453 |
| 55 | CCAAUUAACACCAAUAGCA | 28490-28508 | 28488 |
| 56 | UCCAGAUGACCAAAUUGGC | 28510-28528 | 28508 |
| 57 | CCAAGAUGGUAUUUCUACU | 28589-28607 | 28587 |
| 58 | AGAUGGUAUUUCUACUACC | 28592-28610 | 28590 |
| 59 | GAAUACACCAAAAGAUCAC | 28690-28708 | 28688 |
| 60 | GUCACUAAGAAAUCUGCUG | 29009-29027 | 29007 |
| 61 | ACUAAAGCAUACAAUGUAA | 29066-29084 | 29064 |
| 62 | AGACAAGGAACUGAUUACA | 29150-29168 | 29148 |
| 63 | ACAAGGAACUGAUUACAAA | 29152-29170 | 29150 |
| 64 | AACUGAUUACAAACAUUGG | 29158-29176 | 29156 |
| 65 | CGCAAAUUGCACAAUUUGC | 29178-29196 | 29176 |
| 66 | AAUUGGAUGACAAAGAUCC | 29286-29304 | 29284 |
| 67 | UGAAUAAGCAUAUUGACGC | 29331-29349 | 29329 |
| 68 | GACGCAUACAAAACAUUCC | 29345-29363 | 29343 |
| 69 | CACAUAGCAAUCUUUAAUC | 29668-29686 | 29666 |

[0130] SARS-CoV-2 severe acute respiratory syndrome coronavirus 2 isolate Wuhan-Hu-1, complete genome (NC_045512.2) (SEQ ID NO: 1), viral genome transcript (29903 bases):

| | |
|---|---|
| 1 | attaaaggtt tataccttcc caggtaacaa accaaccaac tttcgatctc ttgtagatct |
| 61 | gttctctaaa cgaactttaa aatctgtgtg gctgtcactc ggctgcatgc ttagtgcact |
| 121 | cacgcagtat aattaataac taattactgt cgttgacagg acacgagtaa ctcgtctatc |
| 181 | ttctgcaggc tgcttacggt ttcgtccgtg ttgcagccga tcatcagcac atctaggttt |
| 241 | cgtccgggtg tgaccgaaag gtaagatgga gagccttgtc cctggtttca acgagaaaac |
| 301 | acacgtccaa ctcagtttgc ctgttttaca ggttcgcgac gtgctcgtac gtggctttgg |
| 361 | agactccgtg gaggaggtct tatcagaggc acgtcaacat cttaaagatg gcacttgtgg |
| 421 | cttagtagaa gttgaaaaag gcgttttgcc tcaacttgaa cagccctatg tgttcatcaa |
| 481 | acgttcggat gctcgaactg cacctcatgg tcatgttatg gttgagctgg tagcagaact |
| 541 | cgaaggcatt cagtacggtc gtagtggtga gacacttggt gtccttgtcc ctcatgtggg |
| 601 | cgaaatacca gtggcttacc gcaaggttct tcttcgtaag aacggtaata aaggagctgg |
| 661 | tggccatagt tacggcgccg atctaaagtc atttgactta ggcgacgagc ttggcactga |
| 721 | tccttatgaa gattttcaag aaaactggaa cactaaacat agcagtggtg ttacccgtga |
| 781 | actcatgcgt gagcttaacg gaggggcata cactcgctat gtcgataaca acttctgtgg |
| 841 | ccctgatggc taccctcttg agtgcattaa agaccttcta gcacgtgctg gtaaagcttc |
| 901 | atgcactttg tccgaacaac tggactttat tgacactaag aggggtgtat actgctgccg |
| 961 | tgaacatgag catgaaattg cttggtacac ggaacgttct gaaaagagct atgaattgca |
| 1021 | gacacctttt gaaattaaat tggcaaagaa atttgacacc ttcaatgggg aatgtccaaa |
| 1081 | ttttgtattt cccttaaatt ccataatcaa gactattcaa ccaagggttg aaaagaaaaa |
| 1141 | gcttgatggc tttatgggta gaattcgatc tgtctatcca gttgcgtcac caaatgaatg |
| 1201 | caaccaaatg tgcctttcaa ctctcatgaa gtgtgatcat tgtggtgaaa cttcatggca |
| 1261 | gacgggcgat tttgttaaag ccacttgcga attttgtggc actgagaatt tgactaaaga |
| 1321 | aggtgccact acttgtggtt acttacccca aaatgctgtt gttaaaattt attgtccagc |
| 1381 | atgtcacaat tcagaagtag gacctgagca tagtcttgcc gaataccata atgaatctgg |
| 1441 | cttgaaaacc attcttcgta agggtggtcg cactattgcc tttggaggct gtgtgttctc |
| 1501 | ttatgttggt tgccataaca agtgtgccta ttgggttcca cgtgctagcg ctaacatagg |
| 1561 | ttgtaaccat acaggtgttg ttggagaagg ttccgaaggt cttaatgaca accttcttga |
| 1621 | aatactccaa aaagagaaag tcaacatcaa tattgttggt gactttaaac ttaatgaaga |
| 1681 | gatcgccatt attttggcat ctttttctgc ttccacaagt gcttttgtgg aaactgtgaa |
| 1741 | aggtttggat tataaagcat tcaaacaaat tgttgaatcc tgtggtaatt ttaaagttac |
| 1801 | aaaaggaaaa gctaaaaaag gtgcctggaa tattggtgaa cagaaatcaa tactgagtcc |
| 1861 | tctttatgca tttgcatcag aggctgctcg tgttgtacga tcaattttct cccgcactct |
| 1921 | tgaaactgct caaaattctg tgcgtgtttt acagaaggcc gctataacaa tactagatgg |
| 1981 | aatttcacag tattcactga gactcattga tgctatgatg ttcacatctg atttggctac |
| 2041 | taacaatcta gttgtaatgg cctacattac aggtggtgtt gttcagttga cttcgcagtg |
| 2101 | gctaactaac atctttggca ctgtttatga aaaactcaaa cccgtccttg attggcttga |
| 2161 | agagaagttt aaggaaggtg tagagtttct tagagacggt tgggaaattg ttaaatttat |
| 2221 | ctcaacctgt gcttgtgaaa ttgtcggtgg acaaattgtc acctgtgcaa aggaaattaa |
| 2281 | ggagagtgtt cagacattct ttaagcttgt aaataaattt ttggctttgt gtgctgactc |
| 2341 | tatcattatt ggtggagcta aacttaaagc cttgaattta ggtgaaacat ttgtcacgca |
| 2401 | ctcaaaggga ttgtacagaa agtgtgttaa atccagagaa gaaactggcc tactcatgcc |
| 2461 | tctaaaagcc ccaaaagaaa ttatcttctt agagggagaa acacttccca cagaagtgtt |
| 2521 | aacagaggaa gttgtcttga aaactggtga tttacaacca ttagaacaac ctactagtga |
| 2581 | agctgttgaa gctccattgg ttggtacacc agtttgtatt aacgggctta tgttgctcga |
| 2641 | aatcaaagac acagaaaagt actgtgccct tgcacctaat atgatggtaa caaacaatac |
| 2701 | cttcacactc aaaggcggtg caccaacaaa ggttactttt ggtgatgaca ctgtgataga |
| 2761 | agtgcaaggt tacaagagtg tgaatatcac ttttgaactt gatgaaagga ttgataaagt |
| 2821 | acttaatgag aagtgctctg cctatacagt tgaactcggt acagaagtaa atgagttcgc |
| 2881 | ctgtgttgtg gcagatgctg tcataaaaac tttgcaacca gtatctgaat tacttacacc |
| 2941 | actgggcatt gatttagatg agtggagtat ggctacatac tacttatttg atgagtctgg |
| 3001 | tgagtttaaa ttggcttcac atatgtattg ttctttctac cctccagatg aggatgaaga |
| 3061 | agaaggtgat tgtgaagaag aagagtttga gccatcaact caatatgagt atggtactga |
| 3121 | agatgattac caaggtaaac ctttggaatt tggtgccact tctgctgctc ttcaacctga |
| 3181 | agaagagcaa gaagaagatt ggttagatga tgatagtcaa caaactgttg gtcaacaaga |
| 3241 | cggcagtgag gacaatcaga caactactat tcaaacaatt gttgaggttc aacctcaatt |
| 3301 | agagatggaa cttacaccag ttgttcagac tattgaagtg aatagtttta gtggttattt |
| 3361 | aaaacttact gacaatgtat acattaaaaa tgcagacatt gtggaagaag ctaaaaaggt |
| 3421 | aaaaccaaca gtggttgtta atgcagccaa tgtttacctt aaacatggag gaggtgttgc |
| 3481 | aggagcctta aataaggcta ctaacaatgc catgcaagtt gaatctgatg attacatagc |
| 3541 | tactaatgga ccacttaaag tgggtggtag ttgtgtttta agcggacaca atcttgctaa |
| 3601 | acactgtctt catgttgtcg gcccaaatgt taacaaaggt gaagacattc aacttcttaa |
| 3661 | gagtgcttat gaaaatttta atcagcacga agttctactt gcaccattat tatcagctgg |
| 3721 | tatttttggt gctgacccta tacattcttt aagagtttgt gtagatactg ttcgcacaaa |
| 3781 | tgtctactta gctgtctttg ataaaaatct ctatgacaaa cttgtttcaa gctttttgga |
| 3841 | aatgaagagt gaaaagcaag ttgaacaaaa gatcgctgag attcctaaag aggaagttaa |
| 3901 | gccatttata actgaaagta aaccttcagt tgaacagaga aaacaagatg ataagaaaat |
| 3961 | caaagcttgt gttgaagaag ttacaacaac tctggaagaa actaagttcc tcacagaaaa |
| 4021 | cttgttactt tatattgaca ttaatggcaa tcttcatcca gattctgcca ctcttgttag |
| 4081 | tgacattgac atcactttct taaagaaaga tgctccatat atagtgggtg atgttgttca |
| 4141 | agagggtgtt ttaactgctg tggttatacc tactaaaaag gctggtggca ctactgaaat |
| 4201 | gctagcgaaa gctttgagaa aagtgccaac agacaattat ataaccactt acccgggtca |
| 4261 | gggtttaaat ggttacactg tagaggaggc aaagacagtg cttaaaaagt gtaaaagtgc |
| 4321 | cttttacatt ctaccatcta ttatctctaa tgagaagcaa gaaattcttg gaactgtttc |
| 4381 | ttggaatttg cgagaaatgc ttgcacatgc agaagaaaca cgcaaattaa tgcctgtctg |
| 4441 | tgtggaaact aaagccatag tttcaactat acagcgtaaa tataagggta ttaaaataca |
| 4501 | agagggtgtg gttgattatg gtgctagatt ttacttttac accagtaaaa caactgtagc |
| 4561 | gtcacttatc aacacactta acgatctaaa tgaaactctt gttacaatgc cacttggcta |
| 4621 | tgtaacacat ggcttaaatt tggaagaagc tgctcggtat atgagatctc tcaaagtgcc |
| 4681 | agctacagtt tctgtttctt cacctgatgc tgttacagcg tataatggtt atcttacttc |
| 4741 | ttcttctaaa acacctgaag aacattttat tgaaaccatc tcacttgctg gttcctataa |
| 4801 | agattggtcc tattctggac aatctacaca actaggtata gaatttctta agagaggtga |
| 4861 | taaaagtgta tattacacta gtaatcctac cacattccac ctagatggtg aagttatcac |
| 4921 | ctttgacaat cttaagacac ttctttcttt gagagaagtg aggactatta aggtgtttac |
| 4981 | aacagtagac aacattaacc tccacacgca agttgtggac atgtcaatga catatggaca |
| 5041 | acagtttggt ccaacttatt tggatggagc tgatgttact aaaataaaac ctcataattc |
| 5101 | acatgaaggt aaaacatttt atgttttacc taatgatgac actctacgtg ttgaggcttt |
| 5161 | tgagtactac cacacaactg atcctagttt tctgggtagg tacatgtcag cattaaatca |
| 5221 | cactaaaaag tggaaatacc cacaagttaa tggtttaact tctattaaat gggcagataa |
| 5281 | caactgttat cttgccactg cattgttaac actccaacaa atagagttga agtttaatcc |
| 5341 | acctgctcta caagatgctt attacagagc aagggctggt gaagctgcta acttttgtgc |
| 5401 | acttatctta gcctactgta ataagacagt aggtgagtta ggtgatgtta gagaaacaat |
| 5461 | gagttacttg tttcaacatg ccaatttaga ttcttgcaaa agagtcttga acgtggtgtg |
| 5521 | taaaacttgt ggacaacagc agacaaccct taagggtgta gaagctgtta tgtacatggg |
| 5581 | cacactttct tatgaacaat ttaagaaagg tgttcagata ccttgtacgt gtggtaaaca |
| 5641 | agctacaaaa tatctagtac aacaggagtc accttttgtt atgatgtcag caccacctgc |
| 5701 | tcagtatgaa cttaagcatg gtacatttac ttgtgctagt gagtacactg gtaattacca |
| 5761 | gtgtggtcac tataaacata taacttctaa agaaactttg tattgcatag acggtgcttt |
| 5821 | acttacaaag tcctcagaat acaaaggtcc tattacggat gttttctaca aagaaaacag |
| 5881 | ttacacaaca accataaaac cagttactta taaattggat ggtgttgttt gtacagaaat |
| 5941 | tgaccctaag ttggacaatt attataagaa agacaattct tatttcacag agcaaccaat |
| 6001 | tgatcttgta ccaaaccaac catatccaaa cgcaagcttc gataatttta agtttgtatg |
| 6061 | tgataatatc aaatttgctg atgatttaaa ccagttaact ggttataaga aacctgcttc |
| 6121 | aagagagctt aaagttacat ttttccctga cttaaatggt gatgtggtgg ctattgatta |
| 6181 | taaacactac acaccctctt ttaagaaagg agctaaattg ttacataaac ctattgtttg |
| 6241 | gcatgttaac aatgcaacta ataaagccac gtataaacca aatacctggt gtatacgttg |
| 6301 | tctttggagc acaaaaccag ttgaaacatc aaattcgttt gatgtactga agtcagagga |
| 6361 | cgcgcaggga atggataatc ttgcctgcga agatctaaaa ccagtctctg aagaagtagt |
| 6421 | ggaaaatcct accatacaga aagacgttct tgagtgtaat gtgaaaacta ccgaagttgt |
| 6481 | aggagacatt atacttaaac cagcaaataa tagtttaaaa attacagaag aggttggcca |
| 6541 | cacagatcta atggctgctt atgtagacaa ttctagtctt actattaaga aacctaatga |
| 6601 | attatctaga gtattaggtt tgaaaaccct tgctactcat ggtttagctg ctgttaatag |
| 6661 | tgtcccttgg gatactatag ctaattatgc taagcctttt cttaacaaag ttgttagtac |
| 6721 | aactactaac atagttacac ggtgtttaaa ccgtgtttgt actaattata tgccttattt |
| 6781 | ctttacttta ttgctacaat tgtgtacttt tactagaagt acaaattcta gaattaaagc |
| 6841 | atctatgccg actactatag caaagaatac tgttaagagt gtcggtaaat tttgtctaga |
| 6901 | ggcttcattt aattatttga agtcacctaa tttttctaaa ctgataaata ttataatttg |
| 6961 | gtttttacta ttaagtgttt gcctaggttc tttaatctac tcaaccgctg ctttaggtgt |
| 7021 | tttaatgtct aatttaggca tgccttctta ctgtactggt tacagagaag gctatttgaa |
| 7081 | ctctactaat gtcactattg caacctactg tactggttct ataccttgta gtgtttgtct |
| 7141 | tagtggttta gattctttag acacctatcc ttctttagaa actatacaaa ttaccatttc |
| 7201 | atcttttaaa tgggatttaa ctgcttttgg cttagttgca gagtggtttt tggcatatat |
| 7261 | tcttttcact aggtttttct atgtacttgg attggctgca atcatgcaat tgtttttcag |
| 7321 | ctattttgca gtacatttta ttagtaattc ttggcttatg tggttaataa ttaatcttgt |
| 7381 | acaaatggcc ccgatttcag ctatggttag aatgtacatc ttctttgcat cattttatta |
| 7441 | tgtatggaaa agttatgtgc atgttgtaga cggttgtaat tcatcaactt gtatgatgtg |
| 7501 | ttacaaacgt aatagagcaa caagagtcga atgtacaact attgttaatg gtgttagaag |
| 7561 | gtccttttat gtctatgcta atggaggtaa aggcttttgc aaactacaca attggaattg |
| 7621 | tgttaattgt gatacattct gtgctggtag tacatttatt agtgatgaag ttgcgagaga |
| 7681 | cttgtcacta cagtttaaaa gaccaataaa tcctactgac cagtcttctt acatcgttga |
| 7741 | tagtgttaca gtgaagaatg gttccatcca tctttacttt gataaagctg gtcaaaagac |
| 7801 | ttatgaaaga cattctctct ctcattttgt taacttagac aacctgagag ctaataacac |
| 7861 | taaaggttca ttgcctatta atgttatagt ttttgatggt aaatcaaaat gtgaagaatc |
| 7921 | atctgcaaaa tcagcgtctg tttactacag tcagcttatg tgtcaaccta tactgttact |
| 7981 | agatcaggca ttagtgtctg atgttggtga tagtgcggaa gttgcagtta aaatgtttga |
| 8041 | tgcttacgtt aatacgtttt catcaacttt taacgtacca atggaaaaac tcaaaacact |
| 8101 | agttgcaact gcagaagctg aacttgcaaa gaatgtgtcc ttagacaatg tcttatctac |
| 8161 | ttttatttca gcagctcggc aagggtttgt tgattcagat gtagaaacta aagatgttgt |
| 8221 | tgaatgtctt aaattgtcac atcaatctga catagaagtt actggcgata gttgtaataa |
| 8281 | ctatatgctc acctataaca aagttgaaaa catgacaccc cgtgaccttg gtgcttgtat |
| 8341 | tgactgtagt gcgcgtcata ttaatgcgca ggtagcaaaa agtcacaaca ttgctttgat |
| 8401 | atggaacgtt aaagatttca tgtcattgtc tgaacaacta cgaaaacaaa tacgtagtgc |
| 8461 | tgctaaaaag aataacttac cttttaagtt gacatgtgca actactagac aagttgttaa |
| 8521 | tgttgtaaca acaaagatag cacttaaggg tggtaaaatt gttaataatt ggttgaagca |
| 8581 | gttaattaaa gttacacttg tgttcctttt tgttgctgct attttctatt taataacacc |
| 8641 | tgttcatgtc atgtctaaac atactgactt ttcaagtgaa atcataggat acaaggctat |
| 8701 | tgatggtggt gtcactcgtg acatagcatc tacagatact tgttttgcta acaaacatgc |
| 8761 | tgattttgac acatggttta gccagcgtgg tggtagttat actaatgaca aagcttgccc |
| 8821 | attgattgct gcagtcataa caagagaagt gggttttgtc gtgcctggtt tgcctggcac |
| 8881 | gatattacgc acaactaatg gtgacttttt gcatttctta cctagagttt ttagtgcagt |
| 8941 | tggtaacatc tgttacacac catcaaaact tatagagtac actgactttg caacatcagc |
| 9001 | ttgtgttttg gctgctgaat gtacaatttt taaagatgct tctggtaagc cagtaccata |
| 9061 | ttgttatgat accaatgtac tagaaggttc tgttgcttat gaaagtttac gccctgacac |
| 9121 | acgttatgtg ctcatggatg gctctattat tcaatttcct aacacctacc ttgaaggttc |
| 9181 | tgttagagtg gtaacaactt ttgattctga gtactgtagg cacggcactt gtgaaagatc |
| 9241 | agaagctggt gtttgtgtat ctactagtgg tagatgggta cttaacaatg attattacag |
| 9301 | atctttacca ggagttttct gtggtgtaga tgctgtaaat ttacttacta atatgtttac |
| 9361 | accactaatt caacctattg gtgctttgga catatcagca tctatagtag ctggtggtat |
| 9421 | tgtagctatc gtagtaacat gccttgccta ctattttatg aggtttagaa gagcttttgg |
| 9481 | tgaatacagt catgtagttg cctttaatac tttactattc cttatgtcat tcactgtact |
| 9541 | ctgtttaaca ccagtttact cattcttacc tggtgtttat tctgttattt acttgtactt |
| 9601 | gacattttat cttactaatg atgtttcttt tttagcacat attcagtgga tggttatgtt |
| 9661 | cacaccttta gtacctttct ggataacaat tgcttatatc atttgtattt ccacaaagca |
| 9721 | tttctattgg ttctttagta attacctaaa gagacgtgta gtctttaatg gtgtttcctt |
| 9781 | tagtactttt gaagaagctg cgctgtgcac ctttttgtta aataaagaaa tgtatctaaa |
| 9841 | gttgcgtagt gatgtgctat tacctcttac gcaatataat agatacttag ctctttataa |
| 9901 | taagtacaag tattttagtg gagcaatgga tacaactagc tacagagaag ctgcttgttg |
| 9961 | tcatctcgca aaggctctca atgacttcag taactcaggt tctgatgttc tttaccaacc |
| 10021 | accacaaacc tctatcacct cagctgtttt gcagagtggt tttagaaaaa tggcattccc |
| 10081 | atctggtaaa gttgagggtt gtatggtaca agtaacttgt ggtacaacta cacttaacgg |
| 10141 | tctttggctt gatgacgtag tttactgtcc aagacatgtg atctgcacct ctgaagacat |
| 10201 | gcttaaccct aattatgaag atttactcat tcgtaagtct aatcataatt tcttggtaca |
| 10261 | ggctggtaat gttcaactca gggttattgg acattctatg caaaattgtg tacttaagct |
| 10321 | taaggttgat acagccaatc ctaagacacc taagtataag tttgttcgca ttcaaccagg |
| 10381 | acagactttt tcagtgttag cttgttacaa tggttcacca tctggtgttt accaatgtgc |
| 10441 | tatgaggccc aatttcacta ttaagggttc attccttaat ggttcatgtg gtagtgttgg |
| 10501 | ttttaacata gattatgact gtgtctcttt ttgttacatg caccatatgg aattaccaac |
| 10561 | tggagttcat gctggcacag acttagaagg taacttttat ggaccttttg ttgacaggca |
| 10621 | aacagcacaa gcagctggta cggacacaac tattacagtt aatgttttag cttggttgta |
| 10681 | cgctgctgtt ataaatggag acaggtggtt tctcaatcga tttaccacaa ctcttaatga |
| 10741 | ctttaacctt gtggctatga agtacaatta tgaacctcta acacaagacc atgttgacat |
| 10801 | actaggacct ctttctgctc aaactggaat tgccgtttta gatatgtgtg cttcattaaa |
| 10861 | agaattactg caaaatggta tgaatggacg taccatattg ggtagtgctt tattagaaga |
| 10921 | tgaatttaca ccttttgatg ttgttagaca atgctcaggt gttactttcc aaagtgcagt |
| 10981 | gaaaagaaca atcaagggta cacaccactg gttgttactc acaattttga cttcactttt |
| 11041 | agttttagtc cagagtactc aatggtcttt gttctttttt ttgtatgaaa atgccttttt |
| 11101 | accttttgct atgggtatta ttgctatgtc tgcttttgca atgatgtttg tcaaacataa |
| 11161 | gcatgcattt ctctgtttgt ttttgttacc ttctcttgcc actgtagctt attttaatat |
| 11221 | ggtctatatg cctgctagtt gggtgatgcg tattatgaca tggttggata tggttgatac |
| 11281 | tagtttgtct ggttttaagc taaaagactg tgttatgtat gcatcagctg tagtgttact |
| 11341 | aatccttatg acagcaagaa ctgtgtatga tgatggtgct aggagagtgt ggacacttat |
| 11401 | gaatgtcttg acactcgttt ataaagttta ttatggtaat gctttagatc aagccatttc |
| 11461 | catgtgggct cttataatct ctgttacttc taactactca ggtgtagtta caactgtcat |
| 11521 | gtttttggcc agaggtattg tttttatgtg tgttgagtat tgccctattt tcttcataac |
| 11581 | tggtaataca cttcagtgta taatgctagt ttattgtttc ttaggctatt tttgtacttg |
| 11641 | ttactttggc ctcttttgtt tactcaaccg ctactttaga ctgactcttg gtgtttatga |
| 11701 | ttacttagtt tctacacagg agtttagata tatgaattca cagggactac tcccacccaa |
| 11761 | gaatagcata gatgccttca aactcaacat taaattgttg ggtgttggtg gcaaaccttg |
| 11821 | tatcaaagta gccactgtac agtctaaaat gtcagatgta aagtgcacat cagtagtctt |
| 11881 | actctcagtt ttgcaacaac tcagagtaga atcatcatct aaattgtggg ctcaatgtgt |
| 11941 | ccagttacac aatgacattc tcttagctaa agatactact gaagcctttg aaaaaatggt |
| 12001 | ttcactactt tctgttttgc tttccatgca gggtgctgta gacataaaca agctttgtga |
| 12061 | agaaatgctg gacaacaggg caaccttaca agctatagcc tcagagttta gttcccttcc |
| 12121 | atcatatgca gcttttgcta ctgctcaaga agcttatgag caggctgttg ctaatggtga |
| 12181 | ttctgaagtt gttcttaaaa agttgaagaa gtctttgaat gtggctaaat ctgaatttga |
| 12241 | ccgtgatgca gccatgcaac gtaagttgga aaagatggct gatcaagcta tgacccaaat |
| 12301 | gtataaacag gctagatctg aggacaagag ggcaaaagtt actagtgcta tgcagacaat |
| 12361 | gcttttcact atgcttagaa agttggataa tgatgcactc aacaacatta tcaacaatgc |
| 12421 | aagagatggt tgtgttccct tgaacataat acctcttaca acagcagcca aactaatggt |
| 12481 | tgtcatacca gactataaca catataaaaa tacgtgtgat ggtacaacat ttacttatgc |
| 12541 | atcagcattg tgggaaatcc aacaggttgt agatgcagat agtaaaattg ttcaacttag |
| 12601 | tgaaattagt atggacaatt cacctaattt agcatggcct cttattgtaa cagctttaag |
| 12661 | ggccaattct gctgtcaaat tacagaataa tgagcttagt cctgttgcac tacgacagat |
| 12721 | gtcttgtgct gccggtacta cacaaactgc ttgcactgat gacaatgcgt tagcttacta |
| 12781 | caacacaaca aagggaggta ggtttgtact tgcactgtta tccgatttac aggatttgaa |
| 12841 | atgggctaga ttccctaaga gtgatggaac tggtactatc tatacagaac tggaaccacc |
| 12901 | ttgtaggttt gttacagaca cacctaaagg tcctaaagtg aagtatttat actttattaa |
| 12961 | aggattaaac aacctaaata gaggtatggt acttggtagt ttagctgcca cagtacgtct |
| 13021 | acaagctggt aatgcaacag aagtgcctgc caattcaact gtattatctt tctgtgcttt |
| 13081 | tgctgtagat gctgctaaag cttacaaaga ttatctagct agtgggggac aaccaatcac |
| 13141 | taattgtgtt aagatgttgt gtacacacac tggtactggt caggcaataa cagttacacc |
| 13201 | ggaagccaat atggatcaag aatcctttgg tggtgcatcg tgttgtctgt actgccgttg |
| 13261 | ccacatagat catccaaatc ctaaaggatt ttgtgactta aaaggtaagt atgtacaaat |
| 13321 | acctacaact tgtgctaatg accctgtggg ttttacactt aaaaacacag tctgtaccgt |
| 13381 | ctgcggtatg tggaaaggtt atggctgtag ttgtgatcaa ctccgcgaac ccatgcttca |
| 13441 | gtcagctgat gcacaatcgt ttttaaacgg gtttgcggtg taagtgcagc ccgtcttaca |
| 13501 | ccgtgcggca caggcactag tactgatgtc gtatacaggg cttttgacat ctacaatgat |
| 13561 | aaagtagctg gttttgctaa attcctaaaa actaattgtt gtcgcttcca agaaaaggac |
| 13621 | gaagatgaca atttaattga ttcttacttt gtagttaaga gacacacttt ctctaactac |
| 13681 | caacatgaag aaacaattta taatttactt aaggattgtc cagctgttgc taaacatgac |
| 13741 | ttctttaagt ttagaataga cggtgacatg gtaccacata tatcacgtca acgtcttact |
| 13801 | aaatacacaa tggcagacct cgtctatgct ttaaggcatt ttgatgaagg taattgtgac |
| 13861 | acattaaaag aaatacttgt cacatacaat tgttgtgatg atgattattt caataaaaag |
| 13921 | gactggtatg attttgtaga aaacccagat atattacgcg tatacgccaa cttaggtgaa |
| 13981 | cgtgtacgcc aagctttgtt aaaaacagta caattctgtg atgccatgcg aaatgctggt |
| 14041 | attgttggtg tactgacatt agataatcaa gatctcaatg gtaactggta tgatttcggt |
| 14101 | gatttcatac aaaccacgcc aggtagtgga gttcctgttg tagattctta ttattcattg |
| 14161 | ttaatgccta tattaacctt gaccagggct ttaactgcag agtcacatgt tgacactgac |
| 14221 | ttaacaaagc cttacattaa gtgggatttg ttaaaatatg acttcacgga agagaggtta |
| 14281 | aaactctttg accgttattt taaatattgg gatcagacat accacccaaa ttgtgttaac |
| 14341 | tgtttggatg acagatgcat tctgcattgt gcaaacttta atgttttatt ctctacagtg |
| 14401 | ttcccaccta caagttttgg accactagtg agaaaaatat ttgttgatgg tgttccattt |
| 14461 | gtagtttcaa ctggatacca cttcagagag ctaggtgttg tacataatca ggatgtaaac |
| 14521 | ttacatagct ctagacttag ttttaaggaa ttacttgtgt atgctgctga ccctgctatg |
| 14581 | cacgctgctt ctggtaatct attactagat aaacgcacta cgtgcttttc agtagctgca |
| 14641 | cttactaaca atgttgcttt tcaaactgtc aaacccggta attttaacaa agacttctat |
| 14701 | gactttgctg tgtctaaggg tttctttaag gaaggaagtt ctgttgaatt aaaacacttc |
| 14761 | ttctttgctc aggatggtaa tgctgctatc agcgattatg actactatcg ttataatcta |
| 14821 | ccaacaatgt gtgatatcag acaactacta tttgtagttg aagttgttga taagtacttt |
| 14881 | gattgttacg atggtggctg tattaatgct aaccaagtca tcgtcaacaa cctagacaaa |
| 14941 | tcagctggtt ttccatttaa taaatggggt aaggctagac tttattatga ttcaatgagt |
| 15001 | tatgaggatc aagatgcact tttcgcatat acaaaacgta atgtcatccc tactataact |
| 15061 | caaatgaatc ttaagtatgc cattagtgca aagaatagag ctcgcaccgt agctggtgtc |
| 15121 | tctatctgta gtactatgac caatagacag tttcatcaaa aattattgaa atcaatagcc |
| 15181 | gccactagag gagctactgt agtaattgga acaagcaaat tctatggtgg ttggcacaac |
| 15241 | atgttaaaaa ctgtttatag tgatgtagaa aaccctcacc ttatgggttg ggattatcct |
| 15301 | aaatgtgata gagccatgcc taacatgctt agaattatgg cctcacttgt tcttgctcgc |
| 15361 | aaacatacaa cgtgttgtag cttgtcacac cgtttctata gattagctaa tgagtgtgct |
| 15421 | caagtattga gtgaaatggt catgtgtggc ggttcactat atgttaaacc aggtggaacc |
| 15481 | tcatcaggag atgccacaac tgcttatgct aatagtgttt ttaacatttg tcaagctgtc |
| 15541 | acggccaatg ttaatgcact tttatctact gatggtaaca aaattgccga taagtatgtc |
| 15601 | cgcaatttac aacacagact ttatgagtgt ctctatagaa atagagatgt tgacacagac |
| 15661 | tttgtgaatg agttttacgc atatttgcgt aaacatttct caatgatgat actctctgac |
| 15721 | gatgctgttg tgtgtttcaa tagcacttat gcatctcaag gtctagtggc tagcataaag |
| 15781 | aactttaagt cagttcttta ttatcaaaac aatgttttta tgtctgaagc aaaatgttgg |
| 15841 | actgagactg accttactaa aggacctcat gaattttgct ctcaacatac aatgctagtt |
| 15901 | aaacagggtg atgattatgt gtaccttcct tacccagatc catcaagaat cctaggggcc |
| 15961 | ggctgttttg tagatgatat cgtaaaaaca gatggtacac ttatgattga acggttcgtg |
| 16021 | tctttagcta tagatgctta cccacttact aaacatccta atcaggagta tgctgatgtc |
| 16081 | tttcatttgt acttacaata cataagaaag ctacatgatg agttaacagg acacatgtta |
| 16141 | gacatgtatt ctgttatgct tactaatgat aacacttcaa ggtattggga acctgagttt |
| 16201 | tatgaggcta tgtacacacc gcatacagtc ttacaggctg ttggggcttg tgttctttgc |
| 16261 | aattcacaga cttcattaag atgtggtgct tgcatacgta gaccattctt atgttgtaaa |
| 16321 | tgctgttacg accatgtcat atcaacatca cataaattag tcttgtctgt taatccgtat |
| 16381 | gtttgcaatg ctccaggttg tgatgtcaca gatgtgactc aactttactt aggaggtatg |
| 16441 | agctattatt gtaaatcaca taaaccaccc attagttttc cattgtgtgc taatggacaa |
| 16501 | gtttttggtt tatataaaaa tacatgtgtt ggtagcgata atgttactga ctttaatgca |
| 16561 | attgcaacat gtgactggac aaatgctggt gattacattt tagctaacac ctgtactgaa |
| 16621 | agactcaagc tttttgcagc agaaacgctc aaagctactg aggagacatt taaactgtct |
| 16681 | tatggtattg ctactgtacg tgaagtgctg tctgacagag aattacatct ttcatgggaa |
| 16741 | gttggtaaac ctagaccacc acttaaccga aattatgtct ttactggtta tcgtgtaact |
| 16801 | aaaaacagta aagtacaaat aggagagtac acctttgaaa aaggtgacta tggtgatgct |
| 16861 | gttgtttacc gaggtacaac aacttacaaa ttaaatgttg gtgattattt tgtgctgaca |
| 16921 | tcacatacag taatgccatt aagtgcacct acactagtgc cacaagagca ctatgttaga |
| 16981 | attactggct tatacccaac actcaatatc tcagatgagt tttctagcaa tgttgcaaat |
| 17041 | tatcaaaagg ttggtatgca aaagtattct acactccagg gaccacctgg tactggtaag |
| 17101 | agtcattttg ctattggcct agctctctac tacccttctg ctcgcatagt gtatacagct |
| 17161 | tgctctcatg ccgctgttga tgcactatgt gagaaggcat taaaatattt gcctatagat |
| 17221 | aaatgtagta gaattatacc tgcacgtgct cgtgtagagt gttttgataa attcaaagtg |
| 17281 | aattcaacat tagaacagta tgtcttttgt actgtaaatg cattgcctga gacgacagca |
| 17341 | gatatagttg tctttgatga aatttcaatg gccacaaatt atgatttgag tgttgtcaat |
| 17401 | gccagattac gtgctaagca ctatgtgtac attggcgacc ctgctcaatt acctgcacca |
| 17461 | cgcacattgc taactaaggg cacactagaa ccagaatatt tcaattcagt gtgtagactt |
| 17521 | atgaaaacta taggtccaga catgttcctc ggaacttgtc ggcgttgtcc tgctgaaatt |
| 17581 | gttgacactg tgagtgcttt ggtttatgat aataagctta aagcacataa agacaaatca |
| 17641 | gctcaatgct ttaaaatgtt ttataagggt gttatcacgc atgatgtttc atctgcaatt |
| 17701 | aacaggccac aaataggcgt ggtaagagaa ttccttacac gtaaccctgc ttggagaaaa |
| 17761 | gctgtcttta tttcacctta taattcacag aatgctgtag cctcaaagat tttgggacta |
| 17821 | ccaactcaaa ctgttgattc atcacagggc tcagaatatg actatgtcat attcactcaa |
| 17881 | accactgaaa cagctcactc ttgtaatgta aacagattta atgttgctat taccagagca |
| 17941 | aaagtaggca tactttgcat aatgtctgat agagaccttt atgacaagtt gcaatttaca |
| 18001 | agtcttgaaa ttccacgtag gaatgtggca actttacaag ctgaaaatgt aacaggactc |
| 18061 | tttaaagatt gtagtaaggt aatcactggg ttacatccta cacaggcacc tacacacctc |
| 18121 | agtgttgaca ctaaattcaa aactgaaggt ttatgtgttg acatacctgg catacctaag |
| 18181 | gacatgacct atagaagact catctctatg atgggtttta aaatgaatta tcaagttaat |
| 18241 | ggttacccta acatgtttat cacccgcgaa gaagctataa gacatgtacg tgcatggatt |
| 18301 | ggcttcgatg tcgaggggtg tcatgctact agagaagctg ttggtaccaa tttaccttta |
| 18361 | cagctaggtt tttctacagg tgttaaccta gttgctgtac ctacaggtta tgttgataca |
| 18421 | cctaataata cagatttttc cagagttagt gctaaaccac cgcctggaga tcaatttaaa |
| 18481 | cacctcatac cacttatgta caaaggactt ccttggaatg tagtgcgtat aaagattgta |
| 18541 | caaatgttaa gtgacacact taaaaatctc tctgacagag tcgtatttgt cttatgggca |
| 18601 | catggctttg agttgacatc tatgaagtat tttgtgaaaa taggacctga gcgcacctgt |
| 18661 | tgtctatgtg atagacgtgc cacatgcttt tccactgctt cagacactta tgcctgttgg |
| 18721 | catcattcta ttggatttga ttacgtctat aatccgttta tgattgatgt tcaacaatgg |
| 18781 | ggttttacag gtaacctaca aagcaaccat gatctgtatt gtcaagtcca tggtaatgca |
| 18841 | catgtagcta gttgtgatgc aatcatgact aggtgtctag ctgtccacga gtgctttgtt |
| 18901 | aagcgtgttg actggactat tgaatatcct ataattggtg atgaactgaa gattaatgcg |
| 18961 | gcttgtagaa aggttcaaca catggttgtt aaagctgcat tattagcaga caaattccca |
| 19021 | gttcttcacg acattggtaa ccctaaagct attaagtgtg tacctcaagc tgatgtagaa |
| 19081 | tggaagttct atgatgcaca gccttgtagt gacaaagctt ataaaataga agaattattc |
| 19141 | tattcttatg ccacacattc tgacaaattc acagatggtg tatgcctatt ttggaattgc |
| 19201 | aatgtcgata gatatcctgc taattccatt gtttgtagat ttgacactag agtgctatct |
| 19261 | aaccttaact tgcctggttg tgatggtggc agtttgtatg taaataaaca tgcattccac |
| 19321 | acaccagctt ttgataaaag tgcttttgtt aatttaaaac aattaccatt tttctattac |
| 19381 | tctgacagtc catgtgagtc tcatggaaaa caagtagtgt cagatataga ttatgtacca |
| 19441 | ctaaagtctg ctacgtgtat aacacgttgc aatttaggtg gtgctgtctg tagacatcat |
| 19501 | gctaatgagt acagattgta tctcgatgct tataacatga tgatctcagc tggctttagc |
| 19561 | ttgtgggttt acaaacaatt tgatacttat aacctctgga acacttttac aagacttcag |
| 19621 | agtttagaaa atgtggcttt taatgttgta aataagggac actttgatgg acaacagggt |
| 19681 | gaagtaccag tttctatcat taataacact gtttacacaa aagttgatgg tgttgatgta |
| 19741 | gaattgtttg aaaataaaac aacattacct gttaatgtag catttgagct ttgggctaag |
| 19801 | cgcaacatta aaccagtacc agaggtgaaa atactcaata atttgggtgt ggacattgct |
| 19861 | gctaatactg tgatctggga ctacaaaaga gatgctccag cacatatatc tactattggt |
| 19921 | gtttgttcta tgactgacat agccaagaaa ccaactgaaa cgatttgtgc accactcact |
| 19981 | gtcttttttg atggtagagt tgatggtcaa gtagacttat ttagaaatgc ccgtaatggt |
| 20041 | gttcttatta cagaaggtag tgttaaaggt ttacaaccat ctgtaggtcc caaacaagct |
| 20101 | agtcttaatg gagtcacatt aattggagaa gccgtaaaaa cacagttcaa ttattataag |
| 20161 | aaagttgatg gtgttgtcca acaattacct gaaacttact ttactcagag tagaaattta |
| 20221 | caagaattta aacccaggag tcaaatggaa attgatttct tagaattagc tatggatgaa |
| 20281 | ttcattgaac ggtataaatt agaaggctat gccttcgaac atatcgttta tggagatttt |
| 20341 | agtcatagtc agttaggtgg tttacatcta ctgattggac tagctaaacg ttttaaggaa |
| 20401 | tcaccttttg aattagaaga ttttattcct atggacagta cagttaaaaa ctatttcata |
| 20461 | acagatgcgc aaacaggttc atctaagtgt gtgtgttctg ttattgattt attacttgat |
| 20521 | gattttgttg aaataataaa atcccaagat ttatctgtag tttctaaggt tgtcaaagtg |
| 20581 | actattgact atacagaaat ttcatttatg ctttggtgta aagatggcca tgtagaaaca |
| 20641 | ttttacccaa aattacaatc tagtcaagcg tggcaaccgg gtgttgctat gcctaatctt |
| 20701 | tacaaaatgc aaagaatgct attagaaaag tgtgaccttc aaaattatgg tgatagtgca |
| 20761 | acattaccta aaggcataat gatgaatgtc gcaaaatata ctcaactgtg tcaatattta |
| 20821 | aacacattaa cattagctgt accctataat atgagagtta tacattttgg tgctggttct |
| 20881 | gataaaggag ttgcaccagg tacagctgtt ttaagacagt ggttgcctac gggtacgctg |
| 20941 | cttgtcgatt cagatcttaa tgactttgtc tctgatgcag attcaacttt gattggtgat |
| 21001 | tgtgcaactg tacatacagc taataaatgg gatctcatta ttagtgatat gtacgaccct |
| 21061 | aagactaaaa atgttacaaa agaaaatgac tctaaagagg gttttttcac ttacatttgt |
| 21121 | gggtttatac aacaaaagct agctcttgga ggttccgtgg ctataaagat aacagaacat |
| 21181 | tcttggaatg ctgatcttta taagctcatg ggacacttcg catggtggac agcctttgtt |
| 21241 | actaatgtga atgcgtcatc atctgaagca tttttaattg gatgtaatta tcttggcaaa |
| 21301 | ccacgcgaac aaatagatgg ttatgtcatg catgcaaatt acatattttg gaggaataca |
| 21361 | aatccaattc agttgtcttc ctattcttta tttgacatga gtaaatttcc ccttaaatta |
| 21421 | aggggtactg ctgttatgtc tttaaaagaa ggtcaaatca atgatatgat tttatctctt |
| 21481 | cttagtaaag gtagacttat aattagagaa aacaacagag ttgttatttc tagtgatgtt |
| 21541 | cttgttaaca actaaacgaa caatgtttgt ttttcttgtt ttattgccac tagtctctag |
| 21601 | tcagtgtgtt aatcttacaa ccagaactca attaccccct gcatacacta attctttcac |
| 21661 | acgtggtgtt tattaccctg acaaagtttt cagatcctca gttttacatt caactcagga |
| 21721 | cttgttctta cctttctttt ccaatgttac ttggttccat gctatacatg tctctgggac |
| 21781 | caatggtact aagaggtttg ataaccctgt cctaccattt aatgatggtg tttattttgc |
| 21841 | ttccactgag aagtctaaca taataagagg ctggattttt ggtactactt tagattcgaa |
| 21901 | gacccagtcc ctacttattg ttaataacgc tactaatgtt gttattaaag tctgtgaatt |
| 21961 | tcaattttgt aatgatccat ttttgggtgt ttattaccac aaaaacaaca aaagttggat |
| 22021 | ggaaagtgag ttcagagttt attctagtgc gaataattgc acttttgaat atgtctctca |
| 22081 | gccttttctt atggaccttg aaggaaaaca gggtaatttc aaaaatctta gggaatttgt |
| 22141 | gtttaagaat attgatggtt attttaaaat atattctaag cacacgccta ttaatttagt |
| 22201 | gcgtgatctc cctcagggtt tttcggcttt agaaccattg gtagatttgc caataggtat |
| 22261 | taacatcact aggtttcaaa ctttacttgc tttacataga agttatttga ctcctggtga |
| 22321 | ttcttcttca ggttggacag ctggtgctgc agcttattat gtgggttatc ttcaacctag |
| 22381 | gacttttcta ttaaaatata atgaaaatgg aaccattaca gatgctgtag actgtgcact |
| 22441 | tgaccctctc tcagaaacaa agtgtacgtt gaaatccttc actgtagaaa aaggaatcta |
| 22501 | tcaaacttct aactttagag tccaaccaac agaatctatt gttagatttc ctaatattac |
| 22561 | aaacttgtgc ccttttggtg aagtttttaa cgccaccaga tttgcatctg tttatgcttg |
| 22621 | gaacaggaag agaatcagca actgtgttgc tgattattct gtcctatata attccgcatc |
| 22681 | attttccact tttaagtgtt atggagtgtc tcctactaaa ttaaatgatc tctgctttac |
| 22741 | taatgtctat gcagattcat ttgtaattag aggtgatgaa gtcagacaaa tcgctccagg |
| 22801 | gcaaactgga aagattgctg attataatta taaattacca gatgatttta caggctgcgt |
| 22861 | tatagcttgg aattctaaca atcttgattc taaggttggt ggtaattata attacctgta |
| 22921 | tagattgttt aggaagtcta atctcaaacc ttttgagaga gatatttcaa ctgaaatcta |
| 22981 | tcaggccggt agcacacctt gtaatggtgt tgaaggtttt aattgttact ttcctttaca |
| 23041 | atcatatggt ttccaaccca ctaatggtgt tggttaccaa ccatacagag tagtagtact |
| 23101 | ttcttttgaa cttctacatg caccagcaac tgtttgtgga cctaaaaagt ctactaattt |
| 23161 | ggttaaaaac aaatgtgtca atttcaactt caatggttta acaggcacag gtgttcttac |
| 23221 | tgagtctaac aaaaagtttc tgcctttcca acaatttggc agagacattg ctgacactac |
| 23281 | tgatgctgtc cgtgatccac agacacttga gattcttgac attacaccat gttcttttgg |
| 23341 | tggtgtcagt gttataacac caggaacaaa tacttctaac caggttgctg ttctttatca |
| 23401 | ggatgttaac tgcacagaag tccctgttgc tattcatgca gatcaactta ctcctacttg |
| 23461 | gcgtgtttat tctacaggtt ctaatgtttt tcaaacacgt gcaggctgtt taataggggc |
| 23521 | tgaacatgtc aacaactcat atgagtgtga catacccatt ggtgcaggta tatgcgctag |
| 23581 | ttatcagact cagactaatt ctcctcggcg ggcacgtagt gtagctagtc aatccatcat |
| 23641 | tgcctacact atgtcacttg gtgcagaaaa ttcagttgct tactctaata actctattgc |
| 23701 | catacccaca aattttacta ttagtgttac cacagaaatt ctaccagtgt ctatgaccaa |
| 23761 | gacatcagta gattgtacaa tgtacatttg tggtgattca actgaatgca gcaatctttt |
| 23821 | gttgcaatat ggcagttttt gtacacaatt aaaccgtgct ttaactggaa tagctgttga |
| 23881 | acaagacaaa aacacccaag aagtttttgc acaagtcaaa caaatttaca aaacaccacc |
| 23941 | aattaaagat tttggtggtt ttaatttttc acaaatatta ccagatccat caaaaccaag |
| 24001 | caagaggtca tttattgaag atctactttt caacaaagtg acacttgcag atgctggctt |
| 24061 | catcaaacaa tatggtgatt gccttggtga tattgctgct agagacctca tttgtgcaca |
| 24121 | aaagtttaac ggccttactg ttttgccacc tttgctcaca gatgaaatga ttgctcaata |
| 24181 | cacttctgca ctgttagcgg gtacaatcac ttctggttgg acctttggtg caggtgctgc |
| 24241 | attacaaata ccatttgcta tgcaaatggc ttataggttt aatggtattg gagttacaca |
| 24301 | gaatgttctc tatgagaacc aaaaattgat tgccaaccaa tttaatagtg ctattggcaa |
| 24361 | aattcaagac tcactttctt ccacagcaag tgcacttgga aaacttcaag atgtggtcaa |
| 24421 | ccaaaatgca caagctttaa acacgcttgt taaacaactt agctccaatt ttggtgcaat |
| 24481 | ttcaagtgtt ttaaatgata tcctttcacg tcttgacaaa gttgaggctg aagtgcaaat |
| 24541 | tgataggttg atcacaggca gacttcaaag tttgcagaca tatgtgactc aacaattaat |
| 24601 | tagagctgca gaaatcagag cttctgctaa tcttgctgct actaaaatgt cagagtgtgt |
| 24661 | acttggacaa tcaaaaagag ttgatttttg tggaaagggc tatcatctta tgtccttccc |
| 24721 | tcagtcagca cctcatggtg tagtcttctt gcatgtgact tatgtccctg cacaagaaaa |
| 24781 | gaacttcaca actgctcctg ccatttgtca tgatggaaaa gcacactttc ctcgtgaagg |
| 24841 | tgtctttgtt tcaaatggca cacactggtt tgtaacacaa aggaattttt atgaaccaca |
| 24901 | aatcattact acagacaaca catttgtgtc tggtaactgt gatgttgtaa taggaattgt |
| 24961 | caacaacaca gtttatgatc ctttgcaacc tgaattagac tcattcaagg aggagttaga |
| 25021 | taaatatttt aagaatcata catcaccaga tgttgattta ggtgacatct ctggcattaa |
| 25081 | tgcttcagtt gtaaacattc aaaaagaaat tgaccgcctc aatgaggttg ccaagaattt |
| 25141 | aaatgaatct ctcatcgatc tccaagaact tggaaagtat gagcagtata taaaatggcc |
| 25201 | atggtacatt tggctaggtt ttatagctgg cttgattgcc atagtaatgg tgacaattat |
| 25261 | gctttgctgt atgaccagtt gctgtagttg tctcaagggc tgttgttctt gtggatcctg |
| 25321 | ctgcaaattt gatgaagacg actctgagcc agtgctcaaa ggagtcaaat tacattacac |
| 25381 | ataaacgaac ttatggattt gtttatgaga atcttcacaa ttggaactgt aactttgaag |
| 25441 | caaggtgaaa tcaaggatgc tactccttca gattttgttc gcgctactgc aacgataccg |
| 25501 | atacaagcct cactcccttt cggatggctt attgttggcg ttgcacttct tgctgttttt |
| 25561 | cagagcgctt ccaaaatcat aaccctcaaa aagagatggc aactagcact ctccaagggt |
| 25621 | gttcactttg tttgcaactt gctgttgttg tttgtaacag tttactcaca ccttttgctc |
| 25681 | gttgctgctg gccttgaagc cccttttctc tatctttatg ctttagtcta cttcttgcag |
| 25741 | agtataaact ttgtaagaat aataatgagg ctttggcttt gctggaaatg ccgttccaaa |
| 25801 | aacccattac tttatgatgc caactatttt ctttgctggc atactaattg ttacgactat |
| 25861 | tgtatacctt acaatagtgt aacttcttca attgtcatta cttcaggtga tggcacaaca |
| 25921 | agtcctattt ctgaacatga ctaccagatt ggtggttata ctgaaaaatg ggaatctgga |
| 25981 | gtaaaagact gtgttgtatt acacagttac ttcacttcag actattacca gctgtactca |
| 26041 | actcaattga gtacagacac tggtgttgaa catgttacct tcttcatcta caataaaatt |
| 26101 | gttgatgagc ctgaagaaca tgtccaaatt cacacaatcg acggttcatc cggagttgtt |
| 26161 | aatccagtaa tggaaccaat ttatgatgaa ccgacgacga ctactagcgt gcctttgtaa |
| 26221 | gcacaagctg atgagtacga acttatgtac tcattcgttt cggaagagac aggtacgtta |
| 26281 | atagttaata gcgtacttct ttttcttgct ttcgtggtat tcttgctagt tacactagcc |
| 26341 | atccttactg cgcttcgatt gtgtgcgtac tgctgcaata ttgttaacgt gagtcttgta |
| 26401 | aaaccttctt tttacgttta ctctcgtgtt aaaaatctga attcttctag agttcctgat |
| 26461 | cttctggtct aaacgaacta aatattatat tagtttttct gtttggaact ttaattttag |
| 26521 | ccatggcaga ttccaacggt actattaccg ttgaagagct taaaaagctc cttgaacaat |
| 26581 | ggaacctagt aataggtttc ctattcctta catggatttg tcttctacaa tttgcctatg |
| 26641 | ccaacaggaa taggtttttg tatataatta agttaatttt cctctggctg ttatggccag |
| 26701 | taactttagc ttgttttgtg cttgctgctg tttacagaat aaattggatc accggtggaa |
| 26761 | ttgctatcgc aatggcttgt cttgtaggct tgatgtggct cagctacttc attgcttctt |
| 26821 | tcagactgtt tgcgcgtacg cgttccatgt ggtcattcaa tccagaaact aacattcttc |
| 26881 | tcaacgtgcc actccatggc actattctga ccagaccgct tctagaaagt gaactcgtaa |
| 26941 | tcggagctgt gatccttcgt ggacatcttc gtattgctgg acaccatcta ggacgctgtg |
| 27001 | acatcaagga cctgcctaaa gaaatcactg ttgctacatc acgaacgctt tcttattaca |
| 27061 | aattgggagc ttcgcagcgt gtagcaggtg actcaggttt tgctgcatac agtcgctaca |
| 27121 | ggattggcaa ctataaatta aacacagacc attccagtag cagtgacaat attgctttgc |
| 27181 | ttgtacagta agtgacaaca gatgtttcat ctcgttgact ttcaggttac tatagcagag |
| 27241 | atattactaa ttattatgag gacttttaaa gtttccattt ggaatcttga ttacatcata |
| 27301 | aacctcataa ttaaaaattt atctaagtca ctaactgaga ataaatattc tcaattagat |
| 27361 | gaagagcaac caatggagat tgattaaacg aacatgaaaa ttattctttt cttggcactg |
| 27421 | ataacactcg ctacttgtga gctttatcac taccaagagt gtgttagagg tacaacagta |
| 27481 | cttttaaaag aaccttgctc ttctggaaca tacgagggca attcaccatt tcatcctcta |
| 27541 | gctgataaca aatttgcact gacttgcttt agcactcaat ttgcttttgc ttgtcctgac |
| 27601 | ggcgtaaaac acgtctatca gttacgtgcc agatcagttt cacctaaact gttcatcaga |
| 27661 | caagaggaag ttcaagaact ttactctcca atttttctta ttgttgcggc aatagtgttt |
| 27721 | ataacacttt gcttcacact caaaagaaag acagaatgat tgaactttca ttaattgact |
| 27781 | tctatttgtg ctttttagcc tttctgctat tccttgtttt aattatgctt attatctttt |
| 27841 | ggttctcact tgaactgcaa gatcataatg aaacttgtca cgcctaaacg aacatgaaat |
| 27901 | ttcttgtttt cttaggaatc atcacaactg tagctgcatt tcaccaagaa tgtagtttac |
| 27961 | agtcatgtac tcaacatcaa ccatatgtag ttgatgaccc gtgtcctatt cacttctatt |
| 28021 | ctaaatggta tattagagta ggagctagaa aatcagcacc tttaattgaa ttgtgcgtgg |
| 28081 | atgaggctgg ttctaaatca cccattcagt acatcgatat cggtaattat acagtttcct |
| 28141 | gtttaccttt tacaattaat tgccaggaac ctaaattggg tagtcttgta gtgcgttgtt |
| 28201 | cgttctatga agacttttta gagtatcatg acgttcgtgt tgttttagat ttcatctaaa |
| 28261 | cgaacaaact aaaatgtctg ataatggacc ccaaaatcag cgaaatgcac cccgcattac |
| 28321 | gtttggtgga ccctcagatt caactggcag taaccagaat ggagaacgca gtggggcgcg |
| 28381 | atcaaaacaa cgtcggcccc aaggtttacc caataatact gcgtcttggt tcaccgctct |
| 28441 | cactcaacat ggcaaggaag accttaaatt ccctcgagga caaggcgttc caattaacac |
| 28501 | caatagcagt ccagatgacc aaattggcta ctaccgaaga gctaccagac gaattcgtgg |
| 28561 | tggtgacggt aaaatgaaag atctcagtcc aagatggtat ttctactacc taggaactgg |
| 28621 | gccagaagct ggacttccct atggtgctaa caaagacggc atcatatggg ttgcaactga |
| 28681 | gggagccttg aatacaccaa aagatcacat tggcacccgc aatcctgcta acaatgctgc |
| 28741 | aatcgtgcta caacttcctc aaggaacaac attgccaaaa ggcttctacg cagaagggag |
| 28801 | cagaggcggc agtcaagcct cttctcgttc ctcatcacgt agtcgcaaca gttcaagaaa |
| 28861 | ttcaactcca ggcagcagta ggggaacttc tcctgctaga atggctggca atggcggtga |
| 28921 | tgctgctctt gctttgctgc tgcttgacag attgaaccag cttgagagca aaatgtctgg |
| 28981 | taaaggccaa caacaacaag gccaaactgt cactaagaaa tctgctgctg aggcttctaa |
| 29041 | gaagcctcgg caaaaacgta ctgccactaa agcatacaat gtaacacaag ctttcggcag |
| 29101 | acgtggtcca gaacaaaccc aaggaaattt tggggaccag gaactaatca gacaaggaac |
| 29161 | tgattacaaa cattggccgc aaattgcaca atttgccccc agcgcttcag cgttcttcgg |
| 29221 | aatgtcgcgc attggcatgg aagtcacacc ttcgggaacg tggttgacct acacaggtgc |
| 29281 | catcaaattg gatgacaaag atccaaattt caaagatcaa gtcattttgc tgaataagca |
| 29341 | tattgacgca tacaaaacat tcccaccaac agagcctaaa aaggacaaaa agaagaaggc |
| 29401 | tgatgaaact caagccttac cgcagagaca gaagaaacag caaactgtga ctcttcttcc |
| 29461 | tgctgcagat ttggatgatt tctccaaaca attgcaacaa tccatgagca gtgctgactc |
| 29521 | aactcaggcc taaactcatg cagaccacac aaggcagatg ggctatataa acgttttcgc |
| 29581 | ttttccgttt acgatatata gtctactctt gtgcagaatg aattctcgta actacatagc |
| 29641 | acaagtagat gtagttaact ttaatctcac atagcaatct ttaatcagtg tgtaacatta |
| 29701 | gggaggactt gaaagagcca ccacattttc accgaggcca cgcggagtac gatcgagtgt |
| 29761 | acagtgaaca atgctaggga gagctgccta tatggaagag ccctaatgtg taaaattaat |
| 29821 | tttagtagtg ctatccccat gtgattttaa tagcttctta ggagaatgac aaaaaaaaaa |
| 29881 | aaaaaaaaaa aaaaaaaaaa aaa |

[0131] In some embodiments, a CoV RNAi agent includes an antisense strand wherein position 19 of the antisense strand (5′→3′) is capable of forming a base pair with position 1 of a 19-mer target sequence disclosed in Table 1. In some embodiments, a CoV RNAi agent includes an antisense strand wherein position 1 of the antisense strand (5′→3′) is capable of forming a base pair with position 19 of a 19-mer target sequence disclosed in Table 1.

[0132] In some embodiments, a CoV RNAi agent includes an antisense strand wherein position 2 of the antisense strand (5′→3′) is capable of forming a base pair with position 18 of a 19-mer target sequence disclosed in Table 1. In some embodiments, a CoV RNAi agent includes an antisense strand wherein positions 2 through 18 of the antisense strand (5′→3′) are capable of forming base pairs with each of the respective complementary bases located at positions 18 through 2 of the 19-mer target sequence disclosed in Table 1.

[0133] For the RNAi agents disclosed herein, the nucleotide at position 1 of the antisense strand (from 5′ end→3′ end) can be perfectly complementary to a SAR_S-CoV-2 viral genome (or other coronavirus genome being targeted), or can be non-complementary to a SARS-CoV-2 viral genome (or other coronavirus genome being targeted). In some embodiments, the nucleotide at position 1 of the antisense strand (from 5′ end→3′ end) is a U, A, or dT. In some embodiments, the nucleotide at position 1 of the antisense strand (from 5′ end→3′ end) forms an A:U or U:A base pair with the sense strand.

[0134] In some embodiments, a CoV RNAi agent antisense strand comprises the sequence of nucleotides (from 5′ end→3′ end) 2-18 or 2-19 of any of the antisense strand sequences in Table 2 or Table 3. In some embodiments, a CoV RNAi agent sense strand comprises the sequence of nucleotides (from 5′ end→3′ end) 1-17, 1-18, or 2-18 of any of the sense strand sequences in Table 2, Table 4, Table 5, or Table 6.

[0135] In some embodiments, a CoV RNAi agent is comprised of (i) an antisense strand comprising the sequence of nucleotides (from 5′ end→3′ end) 2-18 or 2-19 of any of the antisense strand sequences in Table 2 or Table 3, and (ii) a sense strand comprising the sequence of nucleotides (from 5′ end→3′ end) 1-17 or 1-18 of any of the sense strand sequences in Table 2, Table 4, Table 5, or Table 6.

[0136] In some embodiments, the CoV RNAi agents include core 19-mer nucleotide sequences shown in the following Table 2.

TABLE 2
CoV RNAi agent Antisense Strand and Sense Strand Core Stretch Base Sequences
(N = any nucleobase)

| | | | | Corresponding | |
|---|---|---|---|---|---|
| | Antisense Strand Base | | Sense Strand Base | Positions of | Targeted |
| | Sequence (5′→3′) | | Sequence (5′→3′) | Identified | Viral |
| SEQ ID | (Shown as an Unmodified | SEQ ID | (Shown as an Unmodified | Sequence on | Genome |
| NO: | Nucleotide Sequence) | NO: | Nucleotide Sequence) | SEQ ID NO: 1 | Position |
| 70 | AAACUGAGUUGGACGUGUG | 373 | CACACGUCCAACUCAGUUU | 300-318 | 298 |
| 71 | UAACUGAGUUGGACGUGUG | 374 | CACACGUCCAACUCAGUUA | 300-318 | 298 |
| 72 | NAACUGAGUUGGACGUGUG | 375 | CACACGUCCAACUCAGUUN | 300-318 | 298 |
| 73 | NAACUGAGUUGGACGUGUN | 376 | NACACGUCCAACUCAGUUN | 300-318 | 298 |
| 74 | UCAUAAGCACUCUUAAGAA | 377 | UUCUUAAGAGUGCUUAUGA | 3654-3672 | 3652 |
| 75 | ACAUAAGCACUCUUAAGAA | 378 | UUCUUAAGAGUGCUUAUGU | 3654-3672 | 3652 |
| 76 | NCAUAAGCACUCUUAAGAA | 379 | UUCUUAAGAGUGCUUAUGN | 3654-3672 | 3652 |
| 77 | NCAUAAGCACUCUUAAGAN | 380 | NUCUUAAGAGUGCUUAUGN | 3654-3672 | 3652 |
| 78 | UUCAUAAGCACUCUUAAGA | 381 | UCUUAAGAGUGCUUAUGAA | 3655-1673 | 3653 |
| 79 | AUCAUAAGCACUCUUAAGA | 382 | UCUUAAGAGUGCUUAUGAU | 3655-1673 | 3653 |
| 80 | NUCAUAAGCACUCUUAAGA | 383 | UCUUAAGAGUGCUUAUGAN | 3655-1673 | 3653 |
| 81 | NUCAUAAGCACUCUUAAGN | 384 | NCUUAAGAGUGCUUAUGAN | 3655-1673 | 3653 |
| 82 | GAUGAAGAUUGCCAUUAAU | 385 | AUUAAUGGCAAUCUUCAUC | 4040-4058 | 4038 |
| 83 | UAUGAAGAUUGCCAUUAAU | 386 | AUUAAUGGCAAUCUUCAUA | 4040-4058 | 4038 |
| 84 | AAUGAAGAUUGCCAUUAAU | 387 | AUUAAUGGCAAUCUUCAUU | 4040-4058 | 4038 |
| 85 | NAUGAAGAUUGCCAUUAAU | 388 | AUUAAUGGCAAUCUUCAUN | 4040-4058 | 4038 |
| 86 | NAUGAAGAUUGCCAUUAAN | 389 | NUUAAUGGCAAUCUUCAUN | 4040-4058 | 4038 |
| 87 | UUAGUAGGUAUAACCACAG | 390 | CUGUGGUUAUACCUACUAA | 4158-4176 | 4156 |
| 88 | AUAGUAGGUAUAACCACAG | 391 | CUGUGGUUAUACCUACUAU | 4158-4176 | 4156 |
| 89 | NUAGUAGGUAUAACCACAG | 392 | CUGUGGUUAUACCUACUAN | 4158-4176 | 4156 |
| 90 | NUAGUAGGUAUAACCACAN | 393 | NUGUGGUUAUACCUACUAN | 4158-4176 | 4156 |
| 91 | UCUUAAGAUUGUCAAAGGU | 394 | ACCUUUGACAAUCUUAAGA | 4919-4937 | 4917 |
| 92 | ACUUAAGAUUGUCAAAGGU | 395 | ACCUUUGACAAUCUUAAGU | 4919-4937 | 4917 |
| 93 | NCUUAAGAUUGUCAAAGGU | 396 | ACCUUUGACAAUCUUAAGN | 4919-4937 | 4917 |
| 94 | NCUUAAGAUUGUCAAAGGN | 397 | NCCUUUGACAAUCUUAAGN | 4919-4937 | 4917 |
| 95 | AAGAAGUGUCUUAAGAUUG | 398 | CAAUCUUAAGACACUUCUU | 4927-4945 | 4925 |
| 96 | UAGAAGUGUCUUAAGAUUG | 399 | CAAUCUUAAGACACUUCUA | 4927-4945 | 4925 |
| 97 | NAGAAGUGUCUUAAGAUUG | 400 | CAAUCUUAAGACACUUCUN | 4927-4945 | 4925 |
| 98 | NAGAAGUGUCUUAAGAUUN | 401 | NAAUCUUAAGACACUUCUN | 4927-4945 | 4925 |
| 99 | AAAGAAGUGUCUUAAGAUU | 402 | AAUCUUAAGACACUUCUUU | 4928-4946 | 4926 |
| 100 | UAAGAAGUGUCUUAAGAUU | 403 | AAUCUUAAGACACUUCUUA | 4928-4946 | 4926 |
| 101 | NAAGAAGUGUCUUAAGAUU | 404 | AAUCUUAAGACACUUCUUN | 4928-4946 | 4926 |
| 102 | NAAGAAGUGUCUUAAGAUN | 405 | NAUCUUAAGACACUUCUUN | 4928-4946 | 4926 |
| 103 | UCAUAAGAAAGUGUGCCCA | 406 | UGGGCACACUUUCUUAUGA | 5577-5595 | 5575 |
| 104 | ACAUAAGAAAGUGUGCCCA | 407 | UGGGCACACUUUCUUAUGU | 5577-5595 | 5575 |
| 105 | NCAUAAGAAAGUGUGCCCA | 408 | UGGGCACACUUUCUUAUGN | 5577-5595 | 5575 |
| 106 | NCAUAAGAAAGUGUGCCCN | 409 | NGGGCACACUUUCUUAUGN | 5577-5595 | 5575 |
| 107 | CAACUUAGGGUCAAUUUCU | 410 | AGAAAUUGACCCUAAGUUG | 5935-5953 | 5933 |
| 108 | UAACUUAGGGUCAAUUUCU | 411 | AGAAAUUGACCCUAAGUUA | 5935-5953 | 5933 |
| 109 | AAACUUAGGGUCAAUUUCU | 412 | AGAAAUUGACCCUAAGUUU | 5935-5953 | 5933 |
| 110 | NAACUUAGGGUCAAUUUCU | 413 | AGAAAUUGACCCUAAGUUN | 5935-5953 | 5933 |
| 111 | NAACUUAGGGUCAAUUUCN | 414 | NGAAAUUGACCCUAAGUUN | 5935-5953 | 5933 |
| 112 | GGAUUUUCCACUACUUCUU | 415 | AAGAAGUAGUGGAAAAUCC | 6411-6429 | 6409 |
| 113 | UGAUUUUCCACUACUUCUU | 416 | AAGAAGUAGUGGAAAAUCA | 6411-6429 | 6409 |
| 114 | AGAUUUUCCACUACUUCUU | 417 | AAGAAGUAGUGGAAAAUCU | 6411-6429 | 6409 |
| 115 | NGAUUUUCCACUACUUCUU | 418 | AAGAAGUAGUGGAAAAUCN | 6411-6429 | 6409 |
| 116 | NGAUUUUCCACUACUUCUN | 419 | NAGAAGUAGUGGAAAAUCN | 6411-6429 | 6409 |
| 117 | GUAGGAUUUUCCACUACUU | 420 | AAGUAGUGGAAAAUCCUAC | 6414-6432 | 6412 |
| 118 | UUAGGAUUUUCCACUACUU | 421 | AAGUAGUGGAAAAUCCUAA | 6414-6432 | 6412 |
| 119 | AUAGGAUUUUCCACUACUU | 422 | AAGUAGUGGAAAAUCCUAU | 6414-6432 | 6412 |
| 120 | NUAGGAUUUUCCACUACUU | 423 | AAGUAGUGGAAAAUCCUAN | 6414-6432 | 6412 |
| 121 | NUAGGAUUUUCCACUACUN | 424 | NAGUAGUGGAAAAUCCUAN | 6414-6432 | 6412 |
| 122 | AAACGUAUUAACGUAAGCA | 425 | UGCUUACGUUAAUACGUUU | 8041-8059 | 8039 |
| 123 | UAACGUAUUAACGUAAGCA | 426 | UGCUUACGUUAAUACGUUA | 8041-8059 | 8039 |
| 124 | NAACGUAUUAACGUAAGCA | 427 | UGCUUACGUUAAUACGUUN | 8041-8059 | 8039 |
| 125 | NAACGUAUUAACGUAAGCN | 428 | NGCUUACGUUAAUACGUUN | 8041-8059 | 8039 |
| 126 | GUAGAUAAGACAUUGUCUA | 429 | UAGACAAUGUCUUAUCUAC | 8142-8160 | 8140 |
| 127 | UUAGAUAAGACAUUGUCUA | 430 | UAGACAAUGUCUUAUCUAA | 8142-8160 | 8140 |
| 128 | AUAGAUAAGACAUUGUCUA | 431 | UAGACAAUGUCUUAUCUAU | 8142-8160 | 8140 |
| 129 | NUAGAUAAGACAUUGUCUA | 432 | UAGACAAUGUCUUAUCUAN | 8142-8160 | 8140 |
| 130 | NUAGAUAAGACAUUGUCUN | 433 | NAGACAAUGUCUUAUCUAN | 8142-8160 | 8140 |
| 131 | AAACCAACACUACCACAUG | 434 | CAUGUGGUAGUGUUGGUUU | 10485-10503 | 10483 |
| 132 | UAACCAACACUACCACAUG | 435 | CAUGUGGUAGUGUUGGUUA | 10485-10503 | 10483 |
| 133 | NAACCAACACUACCACAUG | 436 | CAUGUGGUAGUGUUGGUUN | 10485-10503 | 10483 |
| 134 | NAACCAACACUACCACAUN | 437 | NAUGUGGUAGUGUUGGUUN | 10485-10503 | 10483 |
| 135 | UUGUCUAACAACAUCAAAA | 438 | UUUUGAUGUUGUUAGACAA | 10933-10951 | 10931 |
| 136 | AUGUCUAACAACAUCAAAA | 439 | UUUUGAUGUUGUUAGACAU | 10933-10951 | 10931 |
| 137 | NUGUCUAACAACAUCAAAA | 440 | UUUUGAUGUUGUUAGACAN | 10933-10951 | 10931 |
| 138 | NUGUCUAACAACAUCAAAN | 441 | NUUUGAUGUUGUUAGACAN | 10933-10951 | 10931 |
| 139 | GCUUGAUCUAAAGCAUUAC | 442 | GUAAUGCUUUAGAUCAAGC | 11436-11454 | 11434 |
| 140 | UCUUGAUCUAAAGCAUUAC | 443 | GUAAUGCUUUAGAUCAAGA | 11436-11454 | 11434 |
| 141 | ACUUGAUCUAAAGCAUUAC | 444 | GUAAUGCUUUAGAUCAAGU | 11436-11454 | 11434 |
| 142 | NCUUGAUCUAAAGCAUUAC | 445 | GUAAUGCUUUAGAUCAAGN | 11436-11454 | 11434 |
| 143 | NCUUGAUCUAAAGCAUUAN | 446 | NUAAUGCUUUAGAUCAAGN | 11436-11454 | 11434 |
| 144 | AUACAUUUGGGUCAUAGCU | 447 | AGCUAUGACCCAAAUGUAU | 12286-12304 | 12284 |
| 145 | UUACAUUUGGGUCAUAGCU | 448 | AGCUAUGACCCAAAUGUAA | 12286-12304 | 12284 |
| 146 | NUACAUUUGGGUCAUAGCU | 449 | AGCUAUGACCCAAAUGUAN | 12286-12304 | 12284 |
| 147 | NUACAUUUGGGUCAUAGCN | 450 | NGCUAUGACCCAAAUGUAN | 12286-12304 | 12284 |
| 148 | UGAUAUAUGUGGUACCAUG | 451 | CAUGGUACCACAUAUAUCA | 13767-13785 | 13765 |
| 149 | AGAUAUAUGUGGUACCAUG | 452 | CAUGGUACCACAUAUAUCU | 13767-13785 | 13765 |
| 150 | NGAUAUAUGUGGUACCAUG | 453 | CAUGGUACCACAUAUAUCN | 13767-13785 | 13765 |
| 151 | NGAUAUAUGUGGUACCAUN | 454 | NAUGGUACCACAUAUAUCN | 13767-13785 | 13765 |
| 152 | GUGAUAUAUGUGGUACCAU | 455 | AUGGUACCACAUAUAUCAC | 13768-13786 | 13766 |
| 153 | UUGAUAUAUGUGGUACCAU | 456 | AUGGUACCACAUAUAUCAA | 13768-13786 | 13766 |
| 154 | AUGAUAUAUGUGGUACCAU | 457 | AUGGUACCACAUAUAUCAU | 13768-13786 | 13766 |
| 155 | NUGAUAUAUGUGGUACCAU | 458 | AUGGUACCACAUAUAUCAN | 13768-13786 | 13766 |
| 156 | NUGAUAUAUGUGGUACCAN | 459 | NUGGUACCACAUAUAUCAN | 13768-13786 | 13766 |
| 157 | UUGAUUAUCUAAUGUCAGU | 460 | ACUGACAUUAGAUAAUCAA | 14052-14070 | 14050 |
| 158 | AUGAUUAUCUAAUGUCAGU | 461 | ACUGACAUUAGAUAAUCAU | 14052-14070 | 14050 |
| 159 | NUGAUUAUCUAAUGUCAGU | 462 | ACUGACAUUAGAUAAUCAN | 14052-14070 | 14050 |
| 160 | NUGAUUAUCUAAUGUCAGN | 463 | NCUGACAUUAGAUAAUCAN | 14052-14070 | 14050 |
| 161 | UUUACAUCCUGAUUAUGUA | 464 | UACAUAAUCAGGAUGUAAA | 14501-14519 | 14499 |
| 162 | AUUACAUCCUGAUUAUGUA | 465 | UACAUAAUCAGGAUGUAAU | 14501-14519 | 14499 |
| 163 | NUUACAUCCUGAUUAUGUA | 466 | UACAUAAUCAGGAUGUAAN | 14501-14519 | 14499 |
| 164 | NUUACAUCCUGAUUAUGUN | 467 | NACAUAAUCAGGAUGUAAN | 14501-14519 | 14499 |
| 165 | AAGUUUACAUCCUGAUUAU | 468 | AUAAUCAGGAUGUAAACUU | 14504-14522 | 14502 |
| 166 | UAGUUUACAUCCUGAUUAU | 469 | AUAAUCAGGAUGUAAACUA | 14504-14522 | 14502 |
| 167 | NAGUUUACAUCCUGAUUAU | 470 | AUAAUCAGGAUGUAAACUN | 14504-14522 | 14502 |
| 168 | NAGUUUACAUCCUGAUUAN | 471 | NUAAUCAGGAUGUAAACUN | 14504-14522 | 14502 |
| 169 | UAAGUUUACAUCCUGAUUA | 472 | UAAUCAGGAUGUAAACUUA | 14505-14523 | 14503 |
| 170 | AAAGUUUACAUCCUGAUUA | 473 | UAAUCAGGAUGUAAACUUU | 14505-14523 | 14503 |
| 171 | NAAGUUUACAUCCUGAUUA | 474 | UAAUCAGGAUGUAAACUUN | 14505-14523 | 14503 |
| 172 | NAAGUUUACAUCCUGAUUN | 475 | NAAUCAGGAUGUAAACUUN | 14505-14523 | 14503 |
| 173 | GAGCUAUGUAAGUUUACAU | 476 | AUGUAAACUUACAUAGCUC | 14513-14531 | 14511 |
| 174 | UAGCUAUGUAAGUUUACAU | 477 | AUGUAAACUUACAUAGCUA | 14513-14531 | 14511 |
| 175 | AAGCUAUGUAAGUUUACAU | 478 | AUGUAAACUUACAUAGCUU | 14513-14531 | 14511 |
| 176 | NAGCUAUGUAAGUUUACAU | 479 | AUGUAAACUUACAUAGCUN | 14513-14531 | 14511 |
| 177 | NAGCUAUGUAAGUUUACAN | 480 | NUGUAAACUUACAUAGCUN | 14513-14531 | 14511 |
| 178 | AUAAUAAAGUCUAGCCUUA | 481 | UAAGGCUAGACUUUAUUAU | 14970-14988 | 14968 |
| 179 | UUAAUAAAGUCUAGCCUUA | 482 | UAAGGCUAGACUUUAUUAA | 14970-14988 | 14968 |
| 180 | NUAAUAAAGUCUAGCCUUA | 483 | UAAGGCUAGACUUUAUUAN | 14970-14988 | 14968 |
| 181 | NUAAUAAAGUCUAGCCUUN | 484 | NAAGGCUAGACUUUAUUAN | 14970-14988 | 14968 |
| 182 | GUACUACAGAUAGAGACAC | 485 | GUGUCUCUAUCUGUAGUAC | 15116-15134 | 15114 |
| 183 | UUACUACAGAUAGAGACAC | 486 | GUGUCUCUAUCUGUAGUAA | 15116-15134 | 15114 |
| 184 | AUACUACAGAUAGAGACAC | 487 | GUGUCUCUAUCUGUAGUAU | 15116-15134 | 15114 |
| 185 | NUACUACAGAUAGAGACAC | 488 | GUGUCUCUAUCUGUAGUAN | 15116-15134 | 15114 |
| 186 | NUACUACAGAUAGAGACAN | 489 | NUGUCUCUAUCUGUAGUAN | 15116-15134 | 15114 |
| 187 | CAUAGUACUACAGAUAGAG | 490 | CUCUAUCUGUAGUACUAUG | 15120-15138 | 15118 |
| 188 | UAUAGUACUACAGAUAGAG | 491 | CUCUAUCUGUAGUACUAUA | 15120-15138 | 15118 |
| 189 | AAUAGUACUACAGAUAGAG | 492 | CUCUAUCUGUAGUACUAUU | 15120-15138 | 15118 |
| 190 | NAUAGUACUACAGAUAGAG | 493 | CUCUAUCUGUAGUACUAUN | 15120-15138 | 15118 |
| 191 | NAUAGUACUACAGAUAGAN | 494 | NUCUAUCUGUAGUACUAUN | 15120-15138 | 15118 |
| 192 | UCAUAGUACUACAGAUAGA | 495 | UCUAUCUGUAGUACUAUGA | 15121-15139 | 15119 |
| 193 | ACAUAGUACUACAGAUAGA | 496 | UCUAUCUGUAGUACUAUGU | 15121-15139 | 15119 |
| 194 | NCAUAGUACUACAGAUAGA | 497 | UCUAUCUGUAGUACUAUGN | 15121-15139 | 15119 |
| 195 | NCAUAGUACUACAGAUAGN | 498 | NCUAUCUGUAGUACUAUGN | 15121-15139 | 15119 |
| 196 | GGUCAUAGUACUACAGAUA | 499 | UAUCUGUAGUACUAUGACC | 15123-15141 | 15121 |
| 197 | UGUCAUAGUACUACAGAUA | 500 | UAUCUGUAGUACUAUGACA | 15123-15141 | 15121 |
| 198 | AGUCAUAGUACUACAGAUA | 501 | UAUCUGUAGUACUAUGACU | 15123-15141 | 15121 |
| 199 | NGUCAUAGUACUACAGAUA | 502 | UAUCUGUAGUACUAUGACN | 15123-15141 | 15121 |
| 200 | NGUCAUAGUACUACAGAUN | 503 | NAUCUGUAGUACUAUGACN | 15123-15141 | 15121 |
| 201 | UGUUUAACUAGCAUUGUAU | 504 | AUACAAUGCUAGUUAAACA | 15887-15905 | 15885 |
| 202 | AGUUUAACUAGCAUUGUAU | 505 | AUACAAUGCUAGUUAAACU | 15887-15905 | 15885 |
| 203 | NGUUUAACUAGCAUUGUAU | 506 | AUACAAUGCUAGUUAAACN | 15887-15905 | 15885 |
| 204 | NGUUUAACUAGCAUUGUAN | 507 | NUACAAUGCUAGUUAAACN | 15887-15905 | 15885 |
| 205 | CUGUUUAACUAGCAUUGUA | 508 | UACAAUGCUAGUUAAACAG | 15888-15906 | 15886 |
| 206 | UUGUUUAACUAGCAUUGUA | 509 | UACAAUGCUAGUUAAACAA | 15888-15906 | 15886 |
| 207 | AUGUUUAACUAGCAUUGUA | 510 | UACAAUGCUAGUUAAACAU | 15888-15906 | 15886 |
| 208 | NUGUUUAACUAGCAUUGUA | 511 | UACAAUGCUAGUUAAACAN | 15888-15906 | 15886 |
| 209 | NUGUUUAACUAGCAUUGUN | 512 | NACAAUGCUAGUUAAACAN | 15888-15906 | 15886 |
| 210 | UAAUUUGCAACAUUGCUAG | 513 | CUAGCAAUGUUGCAAAUUA | 17024-17042 | 17022 |
| 211 | AAAUUUGCAACAUUGCUAG | 514 | CUAGCAAUGUUGCAAAUUU | 17024-17042 | 17022 |
| 212 | NAAUUUGCAACAUUGCUAG | 515 | CUAGCAAUGUUGCAAAUUN | 17024-17042 | 17022 |
| 213 | NAAUUUGCAACAUUGCUAN | 516 | NUAGCAAUGUUGCAAAUUN | 17024-17042 | 17022 |
| 214 | UCUCUAUCAGACAUUAUGC | 517 | GCAUAAUGUCUGAUAGAGA | 17957-17975 | 17955 |
| 215 | ACUCUAUCAGACAUUAUGC | 518 | GCAUAAUGUCUGAUAGAGU | 17957-17975 | 17955 |
| 216 | NCUCUAUCAGACAUUAUGC | 519 | GCAUAAUGUCUGAUAGAGN | 17957-17975 | 17955 |
| 217 | NCUCUAUCAGACAUUAUGN | 520 | NCAUAAUGUCUGAUAGAGN | 17957-17975 | 17955 |
| 218 | CCAUCAUAGAGAUGAGUCU | 521 | AGACUCAUCUCUAUGAUGG | 18196-18214 | 18194 |
| 219 | UCAUCAUAGAGAUGAGUCU | 522 | AGACUCAUCUCUAUGAUGA | 18196-18214 | 18194 |
| 220 | ACAUCAUAGAGAUGAGUCU | 523 | AGACUCAUCUCUAUGAUGU | 18196-18214 | 18194 |
| 221 | NCAUCAUAGAGAUGAGUCU | 524 | AGACUCAUCUCUAUGAUGN | 18196-18214 | 18194 |
| 222 | NCAUCAUAGAGAUGAGUCN | 525 | NGACUCAUCUCUAUGAUGN | 18196-18214 | 18194 |
| 223 | CUCCAAUUAAUGUGACUCC | 526 | GGAGUCACAUUAAUUGGAG | 20110-20128 | 20108 |
| 224 | UUCCAAUUAAUGUGACUCC | 527 | GGAGUCACAUUAAUUGGAA | 20110-20128 | 20108 |
| 225 | AUCCAAUUAAUGUGACUCC | 528 | GGAGUCACAUUAAUUGGAU | 20110-20128 | 20108 |
| 226 | NUCCAAUUAAUGUGACUCC | 529 | GGAGUCACAUUAAUUGGAN | 20110-20128 | 20108 |
| 227 | NUCCAAUUAAUGUGACUCN | 530 | NGAGUCACAUUAAUUGGAN | 20110-20128 | 20108 |
| 228 | UCAUUAAGAUCUGAAUCGA | 531 | UCGAUUCAGAUCUUAAUGA | 20945-20963 | 20943 |
| 229 | ACAUUAAGAUCUGAAUCGA | 532 | UCGAUUCAGAUCUUAAUGU | 20945-20963 | 20943 |
| 230 | NCAUUAAGAUCUGAAUCGA | 533 | UCGAUUCAGAUCUUAAUGN | 20945-20963 | 20943 |
| 231 | NCAUUAAGAUCUGAAUCGN | 534 | NCGAUUCAGAUCUUAAUGN | 20945-20963 | 20943 |
| 232 | UACAUAAGUUCGUACUCAU | 535 | AUGAGUACGAACUUAUGUA | 26231-26249 | 26229 |
| 233 | AACAUAAGUUCGUACUCAU | 536 | AUGAGUACGAACUUAUGUU | 26231-26249 | 26229 |
| 234 | NACAUAAGUUCGUACUCAU | 537 | AUGAGUACGAACUUAUGUN | 26231-26249 | 26229 |
| 235 | NACAUAAGUUCGUACUCAN | 538 | NUGAGUACGAACUUAUGUN | 26231-26249 | 26229 |
| 236 | CGAAUGAGUACAUAAGUUC | 539 | GAACUUAUGUACUCAUUCG | 26239-26257 | 26237 |
| 237 | UGAAUGAGUACAUAAGUUC | 540 | GAACUUAUGUACUCAUUCA | 26239-26257 | 26237 |
| 238 | AGAAUGAGUACAUAAGUUC | 541 | GAACUUAUGUACUCAUUCU | 26239-26257 | 26237 |
| 239 | NGAAUGAGUACAUAAGUUC | 542 | GAACUUAUGUACUCAUUCN | 26239-26257 | 26237 |
| 240 | NGAAUGAGUACAUAAGUUN | 543 | NAACUUAUGUACUCAUUCN | 26239-26257 | 26237 |
| 241 | ACGAAUGAGUACAUAAGUU | 544 | AACUUAUGUACUCAUUCGU | 26240-26258 | 26238 |
| 242 | UCGAAUGAGUACAUAAGUU | 545 | AACUUAUGUACUCAUUCGA | 26240-26258 | 26238 |
| 243 | NCGAAUGAGUACAUAAGUU | 546 | AACUUAUGUACUCAUUCGN | 26240-26258 | 26238 |
| 244 | NCGAAUGAGUACAUAAGUN | 547 | NACUUAUGUACUCAUUCGN | 26240-26258 | 26238 |
| 245 | CGAAACGAAUGAGUACAUA | 548 | UAUGUACUCAUUCGUUUCG | 26244-26262 | 26242 |
| 246 | UGAAACGAAUGAGUACAUA | 549 | UAUGUACUCAUUCGUUUCA | 26244-26262 | 26242 |
| 247 | AGAAACGAAUGAGUACAUA | 550 | UAUGUACUCAUUCGUUUCU | 26244-26262 | 26242 |
| 248 | NGAAACGAAUGAGUACAUA | 551 | UAUGUACUCAUUCGUUUCN | 26244-26262 | 26242 |
| 249 | NGAAACGAAUGAGUACAUN | 552 | NAUGUACUCAUUCGUUUCN | 26244-26262 | 26242 |
| 250 | AAGAAGUACGCUAUUAACU | 553 | AGUUAAUAGCGUACUUCUU | 26283-26301 | 26281 |
| 251 | UAGAAGUACGCUAUUAACU | 554 | AGUUAAUAGCGUACUUCUA | 26283-26301 | 26281 |
| 252 | NAGAAGUACGCUAUUAACU | 555 | AGUUAAUAGCGUACUUCUN | 26283-26301 | 26281 |
| 253 | NAGAAGUACGCUAUUAACN | 556 | NGUUAAUAGCGUACUUCUN | 26283-26301 | 26281 |
| 254 | AAGAAUACCACGAAAGCAA | 557 | UUGCUUUCGUGGUAUUCUU | 26306-26324 | 26304 |
| 255 | UAGAAUACCACGAAAGCAA | 558 | UUGCUUUCGUGGUAUUCUA | 26306-26324 | 26304 |
| 256 | NAGAAUACCACGAAAGCAA | 559 | UUGCUUUCGUGGUAUUCUN | 26306-26324 | 26304 |
| 257 | NAGAAUACCACGAAAGCAN | 560 | NUGCUUUCGUGGUAUUCUN | 26306-26324 | 26304 |
| 258 | CAGUAAGGAUGGCUAGUGU | 561 | ACACUAGCCAUCCUUACUG | 26332-26350 | 26330 |
| 259 | UAGUAAGGAUGGCUAGUGU | 562 | ACACUAGCCAUCCUUACUA | 26332-26350 | 26330 |
| 260 | AAGUAAGGAUGGCUAGUGU | 563 | ACACUAGCCAUCCUUACUU | 26332-26350 | 26330 |
| 261 | NAGUAAGGAUGGCUAGUGU | 564 | ACACUAGCCAUCCUUACUN | 26332-26350 | 26330 |
| 262 | NAGUAAGGAUGGCUAGUGN | 565 | NCACUAGCCAUCCUUACUN | 26332-26350 | 26330 |
| 263 | UUAACAAUAUUGCAGCAGU | 566 | ACUGCUGCAAUAUUGUUAA | 26369-26387 | 26367 |
| 264 | AUAACAAUAUUGCAGCAGU | 567 | ACUGCUGCAAUAUUGUUAU | 26369-26387 | 26367 |
| 265 | NUAACAAUAUUGCAGCAGU | 568 | ACUGCUGCAAUAUUGUUAN | 26369-26387 | 26367 |
| 266 | NUAACAAUAUUGCAGCAGN | 569 | NCUGCUGCAAUAUUGUUAN | 26369-26387 | 26367 |
| 267 | ACGUUAACAAUAUUGCAGC | 570 | GCUGCAAUAUUGUUAACGU | 26372-26390 | 26370 |
| 268 | UCGUUAACAAUAUUGCAGC | 571 | GCUGCAAUAUUGUUAACGA | 26372-26390 | 26370 |
| 269 | NCGUUAACAAUAUUGCAGC | 572 | GCUGCAAUAUUGUUAACGN | 26372-26390 | 26370 |
| 270 | NCGUUAACAAUAUUGCAGN | 573 | NCUGCAAUAUUGUUAACGN | 26372-26390 | 26370 |
| 271 | CACGUUAACAAUAUUGCAG | 574 | CUGCAAUAUUGUUAACGUG | 26373-26391 | 26371 |
| 272 | UACGUUAACAAUAUUGCAG | 575 | CUGCAAUAUUGUUAACGUA | 26373-26391 | 26371 |
| 273 | AACGUUAACAAUAUUGCAG | 576 | CUGCAAUAUUGUUAACGUU | 26373-26391 | 26371 |
| 274 | NACGUUAACAAUAUUGCAG | 577 | CUGCAAUAUUGUUAACGUN | 26373-26391 | 26371 |
| 275 | NACGUUAACAAUAUUGCAN | 578 | NUGCAAUAUUGUUAACGUN | 26373-26391 | 26371 |
| 276 | CGUUUAGACCAGAAGAUCA | 579 | UGAUCUUCUGGUCUAAACG | 26457-26475 | 26455 |
| 277 | UGUUUAGACCAGAAGAUCA | 580 | UGAUCUUCUGGUCUAAACA | 26457-26475 | 26455 |
| 278 | AGUUUAGACCAGAAGAUCA | 581 | UGAUCUUCUGGUCUAAACU | 26457-26475 | 26455 |
| 279 | NGUUUAGACCAGAAGAUCA | 582 | UGAUCUUCUGGUCUAAACN | 26457-26475 | 26455 |
| 280 | NGUUUAGACCAGAAGAUCN | 583 | NGAUCUUCUGGUCUAAACN | 26457-26475 | 26455 |
| 281 | AAUAAGAAAGCGUUCGUGA | 584 | UCACGAACGCUUUCUUAUU | 27039-27057 | 27037 |
| 282 | UAUAAGAAAGCGUUCGUGA | 585 | UCACGAACGCUUUCUUAUA | 27039-27057 | 27037 |
| 283 | NAUAAGAAAGCGUUCGUGA | 586 | UCACGAACGCUUUCUUAUN | 27039-27057 | 27037 |
| 284 | NAUAAGAAAGCGUUCGUGN | 587 | NCACGAACGCUUUCUUAUN | 27039-27057 | 27037 |
| 285 | UUUGUAAUAAGAAAGCGUU | 588 | AACGCUUUCUUAUUACAAA | 27044-27062 | 27042 |
| 286 | AUUGUAAUAAGAAAGCGUU | 589 | AACGCUUUCUUAUUACAAU | 27044-27062 | 27042 |
| 287 | NUUGUAAUAAGAAAGCGUU | 590 | AACGCUUUCUUAUUACAAN | 27044-27062 | 27042 |
| 288 | NUUGUAAUAAGAAAGCGUN | 591 | NACGCUUUCUUAUUACAAN | 27044-27062 | 27042 |
| 289 | CAUCUGUUGUCACUUACUG | 592 | CAGUAAGUGACAACAGAUG | 27186-27204 | 27184 |
| 290 | UAUCUGUUGUCACUUACUG | 593 | CAGUAAGUGACAACAGAUA | 27186-27204 | 27184 |
| 291 | AAUCUGUUGUCACUUACUG | 594 | CAGUAAGUGACAACAGAUU | 27186-27204 | 27184 |
| 292 | NAUCUGUUGUCACUUACUG | 595 | CAGUAAGUGACAACAGAUN | 27186-27204 | 27184 |
| 293 | NAUCUGUUGUCACUUACUN | 596 | NAGUAAGUGACAACAGAUN | 27186-27204 | 27184 |
| 294 | AACAUCUGUUGUCACUUAC | 597 | GUAAGUGACAACAGAUGUU | 27188-27206 | 27186 |
| 295 | UACAUCUGUUGUCACUUAC | 598 | GUAAGUGACAACAGAUGUA | 27188-27206 | 27186 |
| 296 | NACAUCUGUUGUCACUUAC | 599 | GUAAGUGACAACAGAUGUN | 27188-27206 | 27186 |
| 297 | NACAUCUGUUGUCACUUAN | 600 | NUAAGUGACAACAGAUGUN | 27188-27206 | 27186 |
| 298 | GGGAAUUUAAGGUCUUCCU | 601 | AGGAAGACCUUAAAUUCCC | 28455-28473 | 28453 |
| 299 | UGGAAUUUAAGGUCUUCCU | 602 | AGGAAGACCUUAAAUUCCA | 28455-28473 | 28453 |
| 300 | AGGAAUUUAAGGUCUUCCU | 603 | AGGAAGACCUUAAAUUCCU | 28455-28473 | 28453 |
| 301 | NGGAAUUUAAGGUCUUCCU | 604 | AGGAAGACCUUAAAUUCCN | 28455-28473 | 28453 |
| 302 | NGGAAUUUAAGGUCUUCCN | 605 | NGGAAGACCUUAAAUUCCN | 28455-28473 | 28453 |
| 303 | UGCUAUUGGUGUUAAUUGG | 606 | CCAAUUAACACCAAUAGCA | 28490-28508 | 28488 |
| 304 | AGCUAUUGGUGUUAAUUGG | 607 | CCAAUUAACACCAAUAGCU | 28490-28508 | 28488 |
| 305 | NGCUAUUGGUGUUAAUUGG | 608 | CCAAUUAACACCAAUAGCN | 28490-28508 | 28488 |
| 306 | NGCUAUUGGUGUUAAUUGN | 609 | NCAAUUAACACCAAUAGCN | 28490-28508 | 28488 |
| 307 | GCCAAUUUGGUCAUCUGGA | 610 | UCCAGAUGACCAAAUUGGC | 28510-28528 | 28508 |
| 308 | UCCAAUUUGGUCAUCUGGA | 611 | UCCAGAUGACCAAAUUGGA | 28510-28528 | 28508 |
| 309 | ACCAAUUUGGUCAUCUGGA | 612 | UCCAGAUGACCAAAUUGGU | 28510-28528 | 28508 |
| 310 | NCCAAUUUGGUCAUCUGGA | 613 | UCCAGAUGACCAAAUUGGN | 28510-28528 | 28508 |
| 311 | NCCAAUUUGGUCAUCUGGN | 614 | NCCAGAUGACCAAAUUGGN | 28510-28528 | 28508 |
| 312 | AGUAGAAAUACCAUCUUGG | 615 | CCAAGAUGGUAUUUCUACU | 28589-28607 | 28587 |
| 313 | UGUAGAAAUACCAUCUUGG | 616 | CCAAGAUGGUAUUUCUACA | 28589-28607 | 28587 |
| 314 | NGUAGAAAUACCAUCUUGG | 617 | CCAAGAUGGUAUUUCUACN | 28589-28607 | 28587 |
| 315 | NGUAGAAAUACCAUCUUGN | 618 | NCAAGAUGGUAUUUCUACN | 28589-28607 | 28587 |
| 316 | GGUAGUAGAAAUACCAUCU | 619 | AGAUGGUAUUUCUACUACC | 28592-28610 | 28590 |
| 317 | UGUAGUAGAAAUACCAUCU | 620 | AGAUGGUAUUUCUACUACA | 28592-28610 | 28590 |
| 318 | AGUAGUAGAAAUACCAUCU | 621 | AGAUGGUAUUUCUACUACU | 28592-28610 | 28590 |
| 319 | NGUAGUAGAAAUACCAUCU | 622 | AGAUGGUAUUUCUACUACN | 28592-28610 | 28590 |
| 320 | NGUAGUAGAAAUACCAUCN | 623 | NGAUGGUAUUUCUACUACN | 28592-28610 | 28590 |
| 321 | GUGAUCUUUUGGUGUAUUC | 624 | GAAUACACCAAAAGAUCAC | 28690-28708 | 28688 |
| 322 | UUGAUCUUUUGGUGUAUUC | 625 | GAAUACACCAAAAGAUCAA | 28690-28708 | 28688 |
| 323 | AUGAUCUUUUGGUGUAUUC | 626 | GAAUACACCAAAAGAUCAU | 28690-28708 | 28688 |
| 324 | NUGAUCUUUUGGUGUAUUC | 627 | GAAUACACCAAAAGAUCAN | 28690-28708 | 28688 |
| 325 | NUGAUCUUUUGGUGUAUUN | 628 | NAAUACACCAAAAGAUCAN | 28690-28708 | 28688 |
| 326 | CAGCAGAUUUCUUAGUGAC | 629 | GUCACUAAGAAAUCUGCUG | 29009-29027 | 29007 |
| 327 | UAGCAGAUUUCUUAGUGAC | 630 | GUCACUAAGAAAUCUGCUA | 29009-29027 | 29007 |
| 328 | AAGCAGAUUUCUUAGUGAC | 631 | GUCACUAAGAAAUCUGCUU | 29009-29027 | 29007 |
| 329 | NAGCAGAUUUCUUAGUGAC | 632 | GUCACUAAGAAAUCUGCUN | 29009-29027 | 29007 |
| 330 | NAGCAGAUUUCUUAGUGAN | 633 | NUCACUAAGAAAUCUGCUN | 29009-29027 | 29007 |
| 331 | UUACAUUGUAUGCUUUAGU | 634 | ACUAAAGCAUACAAUGUAA | 29066-29084 | 29064 |
| 332 | AUACAUUGUAUGCUUUAGU | 635 | ACUAAAGCAUACAAUGUAU | 29066-29084 | 29064 |
| 333 | NUACAUUGUAUGCUUUAGU | 636 | ACUAAAGCAUACAAUGUAN | 29066-29084 | 29064 |
| 334 | NUACAUUGUAUGCUUUAGN | 637 | NCUAAAGCAUACAAUGUAN | 29066-29084 | 29064 |
| 335 | UGUAAUCAGUUCCUUGUCU | 638 | AGACAAGGAACUGAUUACA | 29150-29168 | 29148 |
| 336 | AGUAAUCAGUUCCUUGUCU | 639 | AGACAAGGAACUGAUUACU | 29150-29168 | 29148 |
| 337 | NGUAAUCAGUUCCUUGUCU | 640 | AGACAAGGAACUGAUUACN | 29150-29168 | 29148 |
| 338 | NGUAAUCAGUUCCUUGUCN | 641 | NGACAAGGAACUGAUUACN | 29150-29168 | 29148 |
| 339 | UUUGUAAUCAGUUCCUUGU | 642 | ACAAGGAACUGAUUACAAA | 29152-29170 | 29150 |
| 340 | AUUGUAAUCAGUUCCUUGU | 643 | ACAAGGAACUGAUUACAAU | 29152-29170 | 29150 |
| 341 | NUUGUAAUCAGUUCCUUGU | 644 | ACAAGGAACUGAUUACAAN | 29152-29170 | 29150 |
| 342 | NUUGUAAUCAGUUCCUUGN | 645 | NCAAGGAACUGAUUACAAN | 29152-29170 | 29150 |
| 343 | CCAAUGUUUGUAAUCAGUU | 646 | AACUGAUUACAAACAUUGG | 29158-29176 | 29156 |
| 344 | UCAAUGUUUGUAAUCAGUU | 647 | AACUGAUUACAAACAUUGA | 29158-29176 | 29156 |
| 345 | ACAAUGUUUGUAAUCAGUU | 648 | AACUGAUUACAAACAUUGU | 29158-29176 | 29156 |
| 346 | NCAAUGUUUGUAAUCAGUU | 649 | AACUGAUUACAAACAUUGN | 29158-29176 | 29156 |
| 347 | NCAAUGUUUGUAAUCAGUN | 650 | NACUGAUUACAAACAUUGN | 29158-29176 | 29156 |
| 348 | GCAAAUUGUGCAAUUUGCG | 651 | CGCAAAUUGCACAAUUUGC | 29178-29196 | 29176 |
| 349 | UCAAAUUGUGCAAUUUGCG | 652 | CGCAAAUUGCACAAUUUGA | 29178-29196 | 29176 |
| 350 | ACAAAUUGUGCAAUUUGCG | 653 | CGCAAAUUGCACAAUUUGU | 29178-29196 | 29176 |
| 351 | NCAAAUUGUGCAAUUUGCG | 654 | CGCAAAUUGCACAAUUUGN | 29178-29196 | 29176 |
| 352 | NCAAAUUGUGCAAUUUGCN | 655 | NGCAAAUUGCACAAUUUGN | 29178-29196 | 29176 |
| 353 | GGAUCUUUGUCAUCCAAUU | 656 | AAUUGGAUGACAAAGAUCC | 29286-29304 | 29284 |
| 354 | UGAUCUUUGUCAUCCAAUU | 657 | AAUUGGAUGACAAAGAUCA | 29286-29304 | 29284 |
| 355 | AGAUCUUUGUCAUCCAAUU | 658 | AAUUGGAUGACAAAGAUCU | 29286-29304 | 29284 |
| 356 | NGAUCUUUGUCAUCCAAUU | 659 | AAUUGGAUGACAAAGAUCN | 29286-29304 | 29284 |
| 357 | NGAUCUUUGUCAUCCAAUN | 660 | NAUUGGAUGACAAAGAUCN | 29286-29304 | 29284 |
| 358 | GCGUCAAUAUGCUUAUUCA | 661 | UGAAUAAGCAUAUUGACGC | 29331-29349 | 29329 |
| 359 | UCGUCAAUAUGCUUAUUCA | 662 | UGAAUAAGCAUAUUGACGA | 29331-29349 | 29329 |
| 360 | ACGUCAAUAUGCUUAUUCA | 663 | UGAAUAAGCAUAUUGACGU | 29331-29349 | 29329 |
| 361 | NCGUCAAUAUGCUUAUUCA | 664 | UGAAUAAGCAUAUUGACGN | 29331-29349 | 29329 |
| 362 | NCGUCAAUAUGCUUAUUCN | 665 | NGAAUAAGCAUAUUGACGN | 29331-29349 | 29329 |
| 363 | GGAAUGUUUUGUAUGCGUC | 666 | GACGCAUACAAAACAUUCC | 29345-29363 | 29343 |
| 364 | UGAAUGUUUUGUAUGCGUC | 667 | GACGCAUACAAAACAUUCA | 29345-29363 | 29343 |
| 365 | AGAAUGUUUUGUAUGCGUC | 668 | GACGCAUACAAAACAUUCU | 29345-29363 | 29343 |
| 366 | NGAAUGUUUUGUAUGCGUC | 669 | GACGCAUACAAAACAUUCN | 29345-29363 | 29343 |
| 367 | NGAAUGUUUUGUAUGCGUN | 670 | NACGCAUACAAAACAUUCN | 29345-29363 | 29343 |
| 368 | GAUUAAAGAUUGCUAUGUG | 671 | CACAUAGCAAUCUUUAAUC | 29668-29686 | 29666 |
| 369 | UAUUAAAGAUUGCUAUGUG | 672 | CACAUAGCAAUCUUUAAUA | 29668-29686 | 29666 |
| 370 | AAUUAAAGAUUGCUAUGUG | 673 | CACAUAGCAAUCUUUAAUU | 29668-29686 | 29666 |
| 371 | NAUUAAAGAUUGCUAUGUG | 674 | CACAUAGCAAUCUUUAAUN | 29668-29686 | 29666 |
| 372 | NAUUAAAGAUUGCUAUGUN | 675 | NACAUAGCAAUCUUUAAUN | 29668-29686 | 29666 |

[0137] The CoV RNAi agent sense strands and antisense strands that comprise or consist of the nucleotide sequences in Table 2 can be modified nucleotides or unmodified nucleotides. In some embodiments, the CoV RNAi agents having the sense and antisense strand sequences that comprise or consist of any of the nucleotide sequences in Table 2 are all or substantially all modified nucleotides.

[0138] In some embodiments, the antisense strand of a CoV RNAi agent disclosed herein differs by 0, 1, 2, or 3 nucleotides from any of the antisense strand sequences in Table 2. In some embodiments, the sense strand of a CoV RNAi agent disclosed herein differs by 0, 1, 2, or 3 nucleotides from any of the sense strand sequences in Table 2.

[0139] As used herein, each N listed in a sequence disclosed in Table 2 may be independently selected from any and all nucleobases (including those found on both modified and unmodified nucleotides). In some embodiments, an N nucleotide listed in a sequence disclosed in Table 2 has a nucleobase that is complementary to the N nucleotide at the corresponding position on the other strand. In some embodiments, an N nucleotide listed in a sequence disclosed in Table 2 has a nucleobase that is not complementary to the N nucleotide at the corresponding position on the other strand. In some embodiments, an N nucleotide listed in a sequence disclosed in Table 2 has a nucleobase that is the same as the N nucleotide at the corresponding position on the other strand. In some embodiments, an N nucleotide listed in a sequence disclosed in Table 2 has a nucleobase that is different from the N nucleotide at the corresponding position on the other strand.

[0140] Certain modified CoV RNAi agent sense and antisense strands are provided in Table 3, Table 4, Table 5, Table 6, and Table 10. Certain modified CoV RNAi agent antisense strands, as well as their underlying unmodified nucleobase sequences, are provided in Table 3. Certain modified CoV RNAi agent sense strands, as well as their underlying unmodified nucleobase sequences, are provided in Tables 4, 5, and 6. In forming CoV RNAi agents, each of the nucleotides in each of the underlying base sequences listed in Tables 3, 4, 5, and 6, as well as in Table 2, above, can be a modified nucleotide.

[0141] The CoV RNAi agents described herein are formed by annealing an antisense strand with a sense strand. A sense strand containing a sequence listed in Table 2, Table 4, Table 5, or Table 6 can be hybridized to any antisense strand containing a sequence listed in Table 2 or Table 3, provided the two sequences have a region of at least 85% complementarity over a contiguous 16, 17, 18, 19, 20, or 21 nucleotide sequence.

[0142] In some embodiments, a CoV RNAi agent antisense strand comprises a nucleotide sequence of any of the sequences in Table 2 or Table 3.

[0143] In some embodiments, a CoV RNAi agent comprises or consists of a duplex having the nucleobase sequences of the sense strand and the antisense strand of any of the sequences in Table 2, Table 3, Table 4, Table 5, Table 6, or Table 10.

[0144] Examples of antisense strands containing modified nucleotides are provided in Table 3. Examples of sense strands containing modified nucleotides are provided in Tables 4, 5 and 6.

[0145] As used in Tables 3, 4, 5, 6, and 10, the following notations are used to indicate modified nucleotides, targeting groups, and linking groups:
[0146] A=adenosine-3′-phosphate
[0147] C=cytidine-3′-phosphate
[0148] G=guanosine-3′-phosphate
[0149] U=uridine-3′-phosphate
[0150] I=inosine-3′-phosphate
[0151] a=2′-O-methyladenosine-3′-phosphate
[0152] as =2′-O-methyladenosine-3′-phosphorothioate
[0153] c=2′-O-methylcytidine-3′-phosphate
[0154] cs=2′-O-methylcytidine-3′-phosphorothioate
[0155] g=2′-O-methylguanosine-3′-phosphate
[0156] gs=2′-O-methylguanosine-3′-phosphorothioate
[0157] i=2′-O-methylinosine-3′-phosphate
[0158] is =2′-O-methylinosine-3′-phosphorothioate
[0159] t=2′-O-methyl-5-methyluridine-3′-phosphate
[0160] ts=2′-O-methyl-5-methyluridine-3′-phosphorothioate
[0161] u=2′-O-methyluridine-3′-phosphate
[0162] us=2′-O-methyluridine-3′-phosphorothioate
[0163] Af=2′-fluoroadenosine-3′-phosphate
[0164] Afs=2′-fluoroadenosine-3′-phosporothioate
[0165] Cf=2′-fluorocytidine-3′-phosphate
[0166] Cfs=2′-fluorocytidine-3′-phosphorothioate
[0167] Gf=2′-fluoroguanosine-3′-phosphate
[0168] Gfs=2′-fluoroguanosine-3′-phosphorothioate
[0169] Tf=2′-fluoro-5′-methyluridine-3′-phosphate
[0170] Tfs=2′-fluoro-5′-methyluridine-3′-phosphorothioate
[0171] Uf=2′-fluorouridine-3′-phosphate
[0172] Ufs=2′-fluorouridine-3′-phosphorothioate
[0173] dT=2′-deoxythymidine-3′-phosphate
[0174] A_{UNA}=2′,3′-seco-adenosine-3′-phosphate
[0175] A_{UNAS}=2′,3′-seco-adenosine-3′-phosphorothioate
[0176] C_{UNA}=2′,3′-seco-cytidine-3′-phosphate
[0177] C_{UNA}s=2′,3′-seco-cytidine-3′-phosphorothioate
[0178] G_{UNA}=2′,3′-seco-guanosine-3′-phosphate
[0179] G_{UNA}s=2′,3′-seco-guanosine-3′-phosphorothioate
[0180] U_{UNA}=2′,3′-seco-uridine-3′-phosphate
[0181] U_{UNA}s=2′,3′-seco-uridine-3′-phosphorothioate
[0182] a_2N=see Table 11
[0183] a_2Ns=see Table 11
[0184] (invAb)=inverted abasic deoxyribonucleotide-5′-phosphate, see Table 11
[0185] (invAb)s=inverted abasic deoxyribonucleotide-5′-phosphorothioate, see Table 11
[0186] s=phosphorothioate linkage
[0187] p=terminal phosphate (as synthesized)
[0188] vpdN=vinyl phosphonate deoxyribonucleotide
[0189] cPrpa=5′-cyclopropyl phosphonate-2′-O-methyladenosine-3′-phosphate (see Table 11)
[0190] cPrpas=5′-cyclopropyl phosphonate-2′-O-methyladenosine-3′-phosphorothioate (see Table 11)
[0191] cPrpu=5′-cyclopropyl phosphonate-2′-O-methyluridine-3′-phosphate (see Table 11) cPrpus=5′-cyclopropyl phosphonate-2′-O-methyluridine-3′-phosphorothioate (see Table 11)
[0192] (Alk-SS-C6)=see Table 11
[0193] (C6-SS-Alk)=see Table 11
[0194] (C6-SS-C6)=see Table 11
[0195] (6-SS-6)=see Table 11
[0196] (C6-SS-Alk-Me)=see Table 11
[0197] (NH2-C6)=see Table 11
[0198] (TriAlkl4)=see Table 11
[0199] (TriAlkl4)s=see Table 11
[0200] -C6-=see Table 11
[0201] -C6s-=see Table 11
[0202] -L6-C6-=see Table 11
[0203] -L6-C6s-=see Table 11
[0204] -Alk-cyHex-=see Table 11
[0205] -Alk-cyHexs-=see Table 11
[0206] -(TA14)=see Table 11 (structure of (TriAlkl4)s after conjugation)
[0207] (TA14)s=see Table 11 (structure of (TriAlkl4)s after conjugation)

[0208] As the person of ordinary skill in the art would readily understand, unless otherwise indicated by the sequence (such as, for example, by a phosphorothioate linkage “s”), when present in an oligonucleotide, the nucleotide monomers are mutually linked by 5′-3′-phosphodiester bonds. As the person of ordinary skill in the art would clearly understand, the inclusion of a phosphorothioate linkage as shown in the modified nucleotide sequences disclosed herein replaces the phosphodiester linkage typically present in oligonucleotides. Further, the person of ordinary skill in the art would readily understand that the terminal nucleotide at the 3′ end of a given oligonucleotide sequence would typically have a hydroxyl (—OH) group at the respective 3′ position of the given monomer instead of a phosphate moiety ex vivo. Additionally, for the embodiments disclosed herein, when viewing the respective strand 5′→3′, the inverted abasic residues are inserted such that the 3′ position of the deoxyribose is linked at the 3′ end of the preceding monomer on the respective strand (see, e.g., Table 11). Moreover, as the person of ordinary skill would readily understand and appreciate, while the phosphorothioate chemical structures depicted herein typically show the anion on the sulfur atom, the inventions disclosed herein encompass all phosphorothioate tautomers (e.g., where the sulfur atom has a double-bond and the anion is on an oxygen atom). Unless expressly indicated otherwise herein, such understandings of the person of ordinary skill in the art are used when describing the CoV RNAi agents and compositions of CoV RNAi agents disclosed herein.

[0209] Certain examples of targeting groups and linking groups used with the CoV RNAi agents disclosed herein are included in the chemical structures provided below in Table 11. Each sense strand and/or antisense strand can have any targeting groups or linking groups listed herein, as well as other targeting or linking groups, conjugated to the 5′ and/or 3′ end of the sequence.

TABLE 3
CoV RNAi agent Antisense Strand Sequences

| | | | Underlying Base | |
|---|---|---|---|---|
| | | | Sequence (5′ → 3′) | |
| AS | | SEQ ID | (Shown as an Unmodified | SEQ ID |
| Strand ID | Modified Antisense Strand (5′ → 3′) | NO. | Nucleotide Sequence) | NO. |
| AM11997-AS | asAfsasCfuGfaGfuUfgGfaCfgUfgUfgUfsc | 676 | AAACUGAGUUGGACGUGUGUC | 1060 |
| AM11999-AS | usGfsasUfuUfuCfcAfcUfaCfuUfcUfuCfsc | 677 | UGAUUUUCCACUACUUCUUCC | 1061 |
| AM12001-AS | usUfsasGfgAfuUfuUfcCfaCfuAfcUfuCfsc | 678 | UUAGGAUUUUCCACUACUUCC | 1062 |
| AM12003-AS | asAfsasCfcAfaCfaCfuAfcCfaCfaUfgAfsc | 679 | AAACCAACACUACCACAUGAC | 1063 |
| AM12005-AS | asUfsasCfaUfuUfgGfgUfcAfuAfgCfuUfsg | 680 | AUACAUUUGGGUCAUAGCUUG | 1064 |
| AM12007-AS | usGfsasUfaUfaUfgUfgGfuAfcCfaUfgUfsc | 681 | UGAUAUAUGUGGUACCAUGUC | 1065 |
| AM12009-AS | usUfsgsAfuAfuAfuGfuGfgUfaCfcAfuGfsc | 682 | UUGAUAUAUGUGGUACCAUGC | 1066 |
| AM12011-AS | usUfsusAfcAfuCfcUfgAfuUfaUfgUfaCfsc | 683 | UUUACAUCCUGAUUAUGUACC | 1067 |
| AM12013-AS | asAfsgsUfuUfaCfaUfcCfuGfaUfuAfuGfsc | 684 | AAGUUUACAUCCUGAUUAUGC | 1068 |
| AM12015-AS | usAfsasGfuUfuAfcAfuCfcUfgAfuUfaUfsg | 685 | UAAGUUUACAUCCUGAUUAUG | 1069 |
| AM12017-AS | usAfsgsCfuAfuGfuAfaGfuUfuAfcAfuCfsc | 686 | UAGCUAUGUAAGUUUACAUCC | 1070 |
| AM12019-AS | asUfsasAfuAfaAfgUfcUfaGfcCfuUfaCfsc | 687 | AUAAUAAAGUCUAGCCUUACC | 1071 |
| AM12021-AS | usUfsasCfuAfcAfgAfuAfgAfgAfcAfcCfsa | 688 | UUACUACAGAUAGAGACACCA | 1072 |
| AM12023-AS | usAfsusAfgUfaCfuAfcAfgAfuAfgAfgAfsc | 689 | UAUAGUACUACAGAUAGAGAC | 1073 |
| AM12025-AS | usCfsasUfaGfuAfcUfaCfaGfaUfaGfaGfsc | 690 | UCAUAGUACUACAGAUAGAGC | 1074 |
| AM12027-AS | usGfsusCfaUfaGfuAfcUfaCfaGfaUfaGfsc | 691 | UGUCAUAGUACUACAGAUAGC | 1075 |
| AM12029-AS | usAfsasUfuUfgCfaAfcAfuUfgCfuAfgAfsc | 692 | UAAUUUGCAACAUUGCUAGAC | 1076 |
| AM12031-AS | usCfsasUfcAfuAfgAfgAfuGfaGfuCfuUfsc | 693 | UCAUCAUAGAGAUGAGUCUUC | 1077 |
| AM12033-AS | usUfscsCfaAfuUfaAfuGfuGfaCfuCfcAfsc | 694 | UUCCAAUUAAUGUGACUCCAC | 1078 |
| AM12035-AS | usAfscsAfuAfaGfuUfcGfuAfcUfcAfuCfsc | 695 | UACAUAAGUUCGUACUCAUCC | 1079 |
| AM12037-AS | usGfsasAfuGfaGfuAfcAfuAfaGfuUfcGfsu | 696 | UGAAUGAGUACAUAAGUUCGU | 1080 |
| AM12039-AS | asCfsgsAfaUfgAfgUfaCfaUfaAfgUfuCfsg | 697 | ACGAAUGAGUACAUAAGUUCG | 1081 |
| AM12041-AS | usGfsasAfaCfgAfaUfgAfgUfaCfaUfaAfsg | 698 | UGAAACGAAUGAGUACAUAAG | 1082 |
| AM12044-AS | asAfsgsAfaGfuAfcGfcUfaUfuAfaCfuAfsc | 699 | AAGAAGUACGCUAUUAACUAC | 1083 |
| AM12046-AS | asAfsgsAfaUfaCfcAfcGfaAfaGfcAfaGfsc | 700 | AAGAAUACCACGAAAGCAAGC | 1084 |
| AM12048-AS | usAfsgsUfaAfgGfaUfgGfcUfaGfuGfuAfsc | 701 | UAGUAAGGAUGGCUAGUGUAC | 1085 |
| AM12050-AS | usUfsasAfcAfaUfaUfuGfcAfgCfaGfuAfsc | 702 | UUAACAAUAUUGCAGCAGUAC | 1086 |
| AM12052-AS | asCfsgsUfuAfaCfaAfuAfuUfgCfaGfcAfsg | 703 | ACGUUAACAAUAUUGCAGCAG | 1087 |
| AM12054-AS | usAfscsGfuUfaAfcAfaUfaUfuGfcAfgCfsa | 704 | UACGUUAACAAUAUUGCAGCA | 1088 |
| AM12057-AS | usGfsusUfuAfgAfcCfaGfaAfgAfuCfaGfsg | 705 | UGUUUAGACCAGAAGAUCAGG | 1089 |
| AM12059-AS | asAfsusAfaGfaAfaGfcGfuUfcGfuGfaUfsg | 706 | AAUAAGAAAGCGUUCGUGAUG | 1090 |
| AM12062-AS | usUfsusGfuAfaUfaAfgAfaAfgCfgUfuCfsg | 707 | UUUGUAAUAAGAAAGCGUUCG | 1091 |
| AM12064-AS | usAfsusCfuGfuUfgUfcAfcUfuAfcUfgUfsc | 708 | UAUCUGUUGUCACUUACUGUC | 1092 |
| AM12066-AS | asAfscsAfuCfuGfuUfgUfcAfcUfuAfcUfsg | 709 | AACAUCUGUUGUCACUUACUG | 1093 |
| AM12068-AS | usGfsasUfcUfuUfgUfcAfuCfcAfaUfuUfsg | 710 | UGAUCUUUGUCAUCCAAUUUG | 1094 |
| AM12070-AS | usAfsusUfaAfaGfaUfuGfcUfaUfgUfgAfsg | 711 | UAUUAAAGAUUGCUAUGUGAG | 1095 |
| AM12469-AS | usUfsgsUfcUfaAfcAfaCfaUfcAfaAfaGfsg | 712 | UUGUCUAACAACAUCAAAAGG | 1096 |
| AM12471-AS | usCfsusUfgAfuCfuAfaAfgCfaUfuAfcCfsa | 713 | UCUUGAUCUAAAGCAUUACCA | 1097 |
| AM12473-AS | usGfsusUfuAfaCfuAfgCfaUfuGfuAfuGfsc | 714 | UGUUUAACUAGCAUUGUAUGC | 1098 |
| AM12475-AS | usUfsgsUfuUfaAfcUfaGfcAfuUfgUfaUfsg | 715 | UUGUUUAACUAGCAUUGUAUG | 1099 |
| AM12477-AS | usCfsusCfuAfuCfaGfaCfaUfuAfuGfcAfsc | 716 | UCUCUAUCAGACAUUAUGCAC | 1100 |
| AM12479-AS | usCfsasUfuAfaGfaUfcUfgAfaUfcGfaCfsc | 717 | UCAUUAAGAUCUGAAUCGACC | 1101 |
| AM12481-AS | usCfscsAfaUfuUfgGfuCfaUfcUfgGfaCfsc | 718 | UCCAAUUUGGUCAUCUGGACC | 1102 |
| AM12483-AS | usCfsasAfaUfuGfuGfcAfaUfuUfgCfgGfsc | 719 | UCAAAUUGUGCAAUUUGCGGC | 1103 |
| AM12485-AS | usGfsasAfuGfuUfuUfgUfaUfgCfgUfcAfsc | 720 | UGAAUGUUUUGUAUGCGUCAC | 1104 |
| AM12563-AS | usGfsgsAfaUfuUfaAfgGfuCfuUfcCfuUfsg | 721 | UGGAAUUUAAGGUCUUCCUUG | 1105 |
| AM12565-AS | usGfscsUfaUfuGfgUfgUfuAfaUfuGfgAfsc | 722 | UGCUAUUGGUGUUAAUUGGAC | 1106 |
| AM12567-AS | asGfsusAfgAfaAfuAfcCfaUfcUfuGfgAfsc | 723 | AGUAGAAAUACCAUCUUGGAC | 1107 |
| AM12569-AS | usGfsusAfgUfaGfaAfaUfaCfcAfuCfuUfsg | 724 | UGUAGUAGAAAUACCAUCUUG | 1108 |
| AM12571-AS | usUfsgsAfuCfuUfuUfgGfuGfuAfuUfcAfsc | 725 | UUGAUCUUUUGGUGUAUUCAC | 1109 |
| AM12573-AS | usAfsgsCfaGfaUfuUfcUfuAfgUfgAfcAfsg | 726 | UAGCAGAUUUCUUAGUGACAG | 1110 |
| AM12575-AS | usUfsasCfaUfuGfuAfuGfcUfuUfaGfuGfsg | 727 | UUACAUUGUAUGCUUUAGUGG | 1111 |
| AM12577-AS | usGfsusAfaUfcAfgUfuCfcUfuGfuCfuGfsc | 728 | UGUAAUCAGUUCCUUGUCUGC | 1112 |
| AM12579-AS | usUfsusGfuAfaUfcAfgUfuCfcUfuGfuCfsc | 729 | UUUGUAAUCAGUUCCUUGUCC | 1113 |
| AM12581-AS | usCfsasAfuGfuUfuGfuAfaUfcAfgUfuCfsc | 730 | UCAAUGUUUGUAAUCAGUUCC | 1114 |
| AM12583-AS | usCfsgsUfcAfaUfaUfgCfuUfaUfuCfaGfsc | 731 | UCGUCAAUAUGCUUAUUCAGC | 1115 |
| AM13120-AS | usCfsasUfaAfgCfaCfuCfuUfaAfgAfaGfsc | 732 | UCAUAAGCACUCUUAAGAAGC | 1116 |
| AM13122-AS | usUfsasGfaUfaAfgAfcAfuUfgUfcUfaAfsg | 733 | UUAGAUAAGACAUUGUCUAAG | 1117 |
| AM13124-AS | usAfsusGfaAfgAfuUfgCfcAfuUfaAfuGfsc | 734 | UAUGAAGAUUGCCAUUAAUGC | 1118 |
| AM13126-AS | asAfsasCfgUfaUfuAfaCfgUfaAfgCfaUfsc | 735 | AAACGUAUUAACGUAAGCAUC | 1119 |
| AM13128-AS | usCfsusUfaAfgAfuUfgUfcAfaAfgGfuGfsc | 736 | UCUUAAGAUUGUCAAAGGUGC | 1120 |
| AM13160-AS | usUfsgsAfuUfaUfcUfaAfuGfuCfaGfuAfsc | 737 | UUGAUUAUCUAAUGUCAGUAC | 1121 |
| AM13543-AS | usUfsasguagguauAfaCfcAfcagcsa | 738 | UUAGUAGGUAUAACCACAGCA | 1122 |
| AM13545-AS | asAfsasGfaagugucUfuAfaGfauugsc | 739 | AAAGAAGUGUCUUAAGAUUGC | 1123 |
| AM13547-AS | usCfsgsucaaUfAfugCfuUfaUfucagsc | 740 | UCGUCAAUAUGCUUAUUCAGC | 1115 |
| AM14662-AS | usUfscsAfuAfaGfcAfcUfcUfuAfaGfaAfsg | 741 | UUCAUAAGCACUCUUAAGAAG | 1124 |
| AM14666-AS | cPrpusCfsusUfaAfgAfuUfgUfcAfaAfgGfuGfsc | 742 | UCUUAAGAUUGUCAAAGGUGC | 1120 |
| AM14667-AS | cPrpusUfsasGfgAfuUfuUfcCfaCfuAfcUfuCfsc | 743 | UUAGGAUUUUCCACUACUUCC | 1062 |
| AM14686-AS | cPrpusUfsasGfaUfaAfgAfcAfuUfgUfcUfaAfsg | 744 | UUAGAUAAGACAUUGUCUAAG | 1117 |
| AM14687-AS | cPrpusGfsusAfgUfaGfaAfaUfaCfcAfuCfuUfsg | 745 | UGUAGUAGAAAUACCAUCUUG | 1108 |
| AM14688-AS | cPrpusUfsusGfuAfaUfcAfgUfuCfcUfuGfuCfsc | 746 | UUUGUAAUCAGUUCCUUGUCC | 1113 |
| AM14689-AS | cPrpusUfsasCfaUfuGfuAfuGfcUfuUfaGfuGfsg | 747 | UUACAUUGUAUGCUUUAGUGG | 1111 |
| AM14690-AS | cPrpusUfsgsUfuUfaAfcUfaGfcAfuUfgUfaUfsg | 748 | UUGUUUAACUAGCAUUGUAUG | 1099 |
| AM14859-AS | cPrpasGfsusAfgAfaAfuAfcCfaUfcUfuGfgAfsc | 749 | AGUAGAAAUACCAUCUUGGAC | 1107 |
| AM14861-AS | cPrpusGfsusAfgAfaAfuAfcCfaUfcUfuGfgAfsc | 750 | UGUAGAAAUACCAUCUUGGAC | 1125 |
| AM15563-AS | cPrpusUfsaGfgauuuucCfaCfuAfcuuscsc | 751 | UUAGGAUUUUCCACUACUUCC | 1062 |
| AM15565-AS | cPrpusUfsaggaUfuuucCfaCfuAfcuuscsc | 752 | UUAGGAUUUUCCACUACUUCC | 1062 |
| AM15566-AS | cPrpusUfsaggauuUfucCfaCfuAfcuuscsc | 753 | UUAGGAUUUUCCACUACUUCC | 1062 |
| AM15568-AS | cPrpusUfsaggauuUfucCfaCfuAfcuuscsg | 754 | UUAGGAUUUUCCACUACUUCG | 1126 |
| AM15569-AS | cPrpuUfaggauuUfucCfaCfuAfcuuscsc | 755 | UUAGGAUUUUCCACUACUUCC | 1062 |
| AM15570-AS | cPrpusUfsgUfuuaacuaGfcAfuUfguasusg | 756 | UUGUUUAACUAGCAUUGUAUG | 1099 |
| AM15572-AS | cPrpuUfgUfuuaacuaGfcAfuUfguasusg | 757 | UUGUUUAACUAGCAUUGUAUG | 1099 |
| AM15574-AS | cPrpusUfsgUfuuaacuaGfcAfuUfguascsg | 758 | UUGUUUAACUAGCAUUGUACG | 1127 |
| AM15575-AS | cPrpusUfsguuuAfacuaGfcAfuUfguasusg | 759 | UUGUUUAACUAGCAUUGUAUG | 1099 |
| AM15576-AS | cPrpasGfsuAfgaaauacCfaUfcUfuggsasc | 760 | AGUAGAAAUACCAUCUUGGAC | 1107 |
| AM15578-AS | cPrpasGfsuagaAfauacCfaUfcUfuggsasc | 761 | AGUAGAAAUACCAUCUUGGAC | 1107 |
| AM15579-AS | cPrpasGfsuagaaaUfacCfaUfcUfuggsasc | 762 | AGUAGAAAUACCAUCUUGGAC | 1107 |
| AM15580-AS | cPrpaGfuagaaaUfacCfaUfcUfuggsasc | 763 | AGUAGAAAUACCAUCUUGGAC | 1107 |
| AM15582-AS | cPrpusGfsuagaaaUfacCfaUfcUfuggsasc | 764 | UGUAGAAAUACCAUCUUGGAC | 1125 |
| AM15795-AS | cPrpusUfsusGfuaaucagUfuCfcUfugucsc | 765 | UUUGUAAUCAGUUCCUUGUCC | 1113 |
| AM15797-AS | cPrpusUfsusGfuaaUfCfagUfuCfcUfugucsc | 766 | UUUGUAAUCAGUUCCUUGUCC | 1113 |
| AM15798-AS | cPrpusUfsuGfuaaucagUfuCfcUfuguscsc | 767 | UUUGUAAUCAGUUCCUUGUCC | 1113 |
| AM15799-AS | cPrpuUfuGfuaaucagUfuCfcUfuguscsc | 768 | UUUGUAAUCAGUUCCUUGUCC | 1113 |
| AM15801-AS | cPrpusUfsusGfuaaucagUfuCfcUfugucsg | 769 | UUUGUAAUCAGUUCCUUGUCG | 1128 |
| AM15803-AS | cPrpusAfsasGfuUfuAfcAfuCfcUfgAfuUfaUfsg | 770 | UAAGUUUACAUCCUGAUUAUG | 1069 |
| AM15804-AS | cPrpusAfsasGfuuuacauCfcUfgAfuuausg | 771 | UAAGUUUACAUCCUGAUUAUG | 1069 |
| AM15807-AS | cPrpusAfsasGfuuuacauCfcUfgAfuuacsg | 772 | UAAGUUUACAUCCUGAUUACG | 1129 |
| AM15808-AS | cPrpusAfsasGfuuuAfCfauCfcUfgAfuuausg | 773 | UAAGUUUACAUCCUGAUUAUG | 1069 |
| AM15810-AS | cPrpusAfsgsCfuAfuGfuAfaGfuUfuAfcAfuCfsc | 774 | UAGCUAUGUAAGUUUACAUCC | 1070 |
| AM15812-AS | cPrpusAfsgcuaugUfaaGfuUfuAfcauscsc | 775 | UAGCUAUGUAAGUUUACAUCC | 1070 |
| AM15813-AS | cPrpusCfsusUfaagauugUfcAfaAfggugsc | 776 | UCUUAAGAUUGUCAAAGGUGC | 1120 |
| AM15815-AS | cPrpusCfsusUfaagAfUfugUfcAfaAfggugsc | 777 | UCUUAAGAUUGUCAAAGGUGC | 1120 |
| AM15816-AS | cPrpusCfsusuaaGfauugUfcAfaAfggugsc | 778 | UCUUAAGAUUGUCAAAGGUGC | 1120 |
| AM15818-AS | cPrpusUfsasGfuAfgGfuAfuAfaCfcAfcAfgCfsa | 779 | UUAGUAGGUAUAACCACAGCA | 1122 |
| AM15820-AS | cPrpasAfsgsAfaGfuGfuCfuUfaAfgAfuUfgUfsc | 780 | AAGAAGUGUCUUAAGAUUGUC | 1130 |
| AM15822-AS | cPrpusCfsasUfaAfgAfaAfgUfgUfgCfcCfaUfsg | 781 | UCAUAAGAAAGUGUGCCCAUG | 1131 |
| AM15824-AS | cPrpusAfsasCfuUfaGfgGfuCfaAfuUfuCfuGfsu | 782 | UAACUUAGGGUCAAUUUCUGU | 1132 |
| AM15826-AS | cPrpasAfsasCfgUfaUfuAfaCfgUfaAfgCfaUfsc | 783 | AAACGUAUUAACGUAAGCAUC | 1119 |
| AM15828-AS | cPrpasUfsasCfaUfuUfgGfgUfcAfuAfgCfuUfsg | 784 | AUACAUUUGGGUCAUAGCUUG | 1064 |
| AM15830-AS | cPrpusCfsasUfuAfaGfaUfcUfgAfaUfcGfaCfsa | 785 | UCAUUAAGAUCUGAAUCGACA | 1133 |
| AM15832-AS | cPrpasAfsgsAfaUfaCfcAfcGfaAfaGfcAfaGfsc | 786 | AAGAAUACCACGAAAGCAAGC | 1084 |
| AM16516-AS | cPrpuUfaGfgauuuucCfaCfuAfcuuscsc | 787 | UUAGGAUUUUCCACUACUUCC | 1062 |
| AM16517-AS | cPrpuUfaGfgauuuucCfaCfuAfcuuscsg | 788 | UUAGGAUUUUCCACUACUUCG | 1126 |
| AM16519-AS | cPrpusUfsuGfuaaucagUfuCfcUfuguscsu | 789 | UUUGUAAUCAGUUCCUUGUCU | 1134 |
| AM16521-AS | cPrpusAfsaGfuuuacauCfcUfgAfuuasusg | 790 | UAAGUUUACAUCCUGAUUAUG | 1069 |
| AM16522-AS | cPrpuAfaGfuuuacauCfcUfgAfuuausg | 791 | UAAGUUUACAUCCUGAUUAUG | 1069 |
| AM16523-AS | cPrpuAfaGfuuuacauCfcUfgAfuuascsg | 792 | UAAGUUUACAUCCUGAUUACG | 1129 |
| AM16966-AS | cPrpusUfsaGfgauuuucCfaCfuAfcuuscsg | 793 | UUAGGAUUUUCCACUACUUCG | 1126 |

TABLE 4
CoV RNAi Agent Sense Strand Sequences
(Shown Without Linkers, Conjugates, or Capping Moieties.)

| | | | Underlying Base | |
|---|---|---|---|---|
| | | | Sequence (5′ → 3′) | |
| | Modified Sense Strand | SEQ ID | (Shown as an Unmodified | SEQ ID |
| Strand ID | (5′ → 3′) | NO. | Nucleotide Sequence) | NO. |
| AM11996-SS-NL | gacacacgUfCfCfaacucaguuu | 794 | GACACACGUCCAACUCAGUUU | 1135 |
| AM11998-SS-NL | ggaagaagUfAfGfuggaaaauca | 795 | GGAAGAAGUAGUGGAAAAUCA | 1136 |
| AM12000-SS-NL | ggaaguagUfGfGfaaaauccuaa | 796 | GGAAGUAGUGGAAAAUCCUAA | 1137 |
| AM12002-SS-NL | gucaugugGfUfAfguguuiguuu | 797 | GUCAUGUGGUAGUGUUIGUUU | 1138 |
| AM12004-SS-NL | caagcuauGfAfCfccaaauguau | 798 | CAAGCUAUGACCCAAAUGUAU | 1139 |
| AM12006-SS-NL | gacaugguAfCfCfacauauauca | 799 | GACAUGGUACCACAUAUAUCA | 1140 |
| AM12008-SS-NL | gcaugguaCfCfAfcauauaucaa | 800 | GCAUGGUACCACAUAUAUCAA | 1141 |
| AM12010-SS-NL | gguacauaAfUfCfaggauguaaa | 801 | GGUACAUAAUCAGGAUGUAAA | 1142 |
| AM12012-SS-NL | gcauaaucAfGfGfauguaaacuu | 802 | GCAUAAUCAGGAUGUAAACUU | 1143 |
| AM12014-SS-NL | ca_2NuaaucaGfGfAfuguaaacuua | 803 | CAUAAUCAGGAUGUAAACUUA | 1144 |
| AM12016-SS-NL | ggauguaaAfCfUfuacauagcua | 804 | GGAUGUAAACUUACAUAGCUA | 1145 |
| AM12018-SS-NL | gguaaggcUfAfGfacuuuauua_2Nu | 805 | GGUAAGGCUAGACUUUAUUAU | 1146 |
| AM12020-SS-NL | uggugucuCfUfAfucuguaguaa | 806 | UGGUGUCUCUAUCUGUAGUAA | 1147 |
| AM12022-SS-NL | gucucuauCfUfGfuaguacuaua | 807 | GUCUCUAUCUGUAGUACUAUA | 1148 |
| AM12024-SS-NL | gcucuaucUfGfUfaguacuauga | 808 | GCUCUAUCUGUAGUACUAUGA | 1149 |
| AM12026-SS-NL | gcuaucugUfAfGfuacuaugaca | 809 | GCUAUCUGUAGUACUAUGACA | 1150 |
| AM12028-SS-NL | gucuagcaAfUfGfuugcaaa_2Nuua | 810 | GUCUAGCAAUGUUGCAAAUUA | 1151 |
| AM12030-SS-NL | ga_2NagacucAfUfCfucuaugauga | 811 | GAAGACUCAUCUCUAUGAUGA | 1152 |
| AM12032-SS-NL | guggagucAfCfAfuuaauuggaa | 812 | GUGGAGUCACAUUAAUUGGAA | 1153 |
| AM12034-SS-NL | ggaugaguAfCfGfaacuuaugua | 813 | GGAUGAGUACGAACUUAUGUA | 1154 |
| AM12036-SS-NL | acgaacuuAfUfGfuacucauuca | 814 | ACGAACUUAUGUACUCAUUCA | 1155 |
| AM12038-SS-NL | cgaacuuaUfGfUfacucauucgu | 815 | CGAACUUAUGUACUCAUUCGU | 1156 |
| AM12040-SS-NL | cuuauguaCfUfCfauucguuuca | 816 | CUUAUGUACUCAUUCGUUUCA | 1157 |
| AM12042-SS-NL | cuuauguaCfUfCfauuciuuuca | 817 | CUUAUGUACUCAUUCIUUUCA | 1158 |
| AM12043-SS-NL | guaguuaaUfAfGfcguacuucuu | 818 | GUAGUUAAUAGCGUACUUCUU | 1159 |
| AM12045-SS-NL | gcuugcuuUfCfGfugguauucuu | 819 | GCUUGCUUUCGUGGUAUUCUU | 1160 |
| AM12047-SS-NL | guacacuaGfCfCfauccuuacua | 820 | GUACACUAGCCAUCCUUACUA | 1161 |
| AM12049-SS-NL | guacugcuGfCfAfauauuguuaa | 821 | GUACUGCUGCAAUAUUGUUAA | 1162 |
| AM12051-SS-NL | cugcugcaAfUfAfuuguuaacgu | 822 | CUGCUGCAAUAUUGUUAACGU | 1163 |
| AM12053-SS-NL | ugcugcaaUfAfUfuguuaacgua | 823 | UGCUGCAAUAUUGUUAACGUA | 1164 |
| AM12055-SS-NL | ugcugcaaUfa_2NUfuguuaacgua | 824 | UGCUGCAAUAUUGUUAACGUA | 1164 |
| AM12056-SS-NL | ccugaucuUfCfUfggucuaaaca | 825 | CCUGAUCUUCUGGUCUAAACA | 1165 |
| AM12058-SS-NL | caucacgaAfCfGfcuuucuuauu | 826 | CAUCACGAACGCUUUCUUAUU | 1166 |
| AM12060-SS-NL | caucacgaAfCfGfcuuucuua_2Nuu | 827 | CAUCACGAACGCUUUCUUAUU | 1166 |
| AM12061-SS-NL | cgaacgcuUfUfCfuuauuacaaa | 828 | CGAACGCUUUCUUAUUACAAA | 1167 |
| AM12063-SS-NL | gacaguaaGfUfGfacaacagaua | 829 | GACAGUAAGUGACAACAGAUA | 1168 |
| AM12065-SS-NL | caguaaguGfAfCfaacagauguu | 830 | CAGUAAGUGACAACAGAUGUU | 1169 |
| AM12067-SS-NL | ca_2NaauuggAfUfGfacaaagauca | 831 | CAAAUUGGAUGACAAAGAUCA | 1170 |
| AM12069-SS-NL | cucacauaGfCfAfaucuuuaa_2Nua | 832 | CUCACAUAGCAAUCUUUAAUA | 1171 |
| AM12468-SS-NL | ccuuuugaUfGfUfuguuagacaa | 833 | CCUUUUGAUGUUGUUAGACAA | 1172 |
| AM12470-SS-NL | ugguaaugCfUfUfuagaucaaga | 834 | UGGUAAUGCUUUAGAUCAAGA | 1173 |
| AM12472-SS-NL | gcauacaaUfGfCfuaguuaaaca | 835 | GCAUACAAUGCUAGUUAAACA | 1174 |
| AM12474-SS-NL | ca_2NuacaauGfCfUfaguuaaacaa | 836 | CAUACAAUGCUAGUUAAACAA | 1175 |
| AM12476-SS-NL | gugcauaaUfGfUfcugauagaga | 837 | GUGCAUAAUGUCUGAUAGAGA | 1176 |
| AM12478-SS-NL | ggucgauuCfAfGfaucuuaauga | 838 | GGUCGAUUCAGAUCUUAAUGA | 1177 |
| AM12480-SS-NL | gguccagaUfGfAfccaaauugga | 839 | GGUCCAGAUGACCAAAUUGGA | 1178 |
| AM12482-SS-NL | gccgcaaaUfUfGfcacaauuuga | 840 | GCCGCAAAUUGCACAAUUUGA | 1179 |
| AM12484-SS-NL | gugacgcaUfAfCfaaaacauuca | 841 | GUGACGCAUACAAAACAUUCA | 1180 |
| AM12562-SS-NL | ca_2NaggaagAfCfCfuuaaauucca | 842 | CAAGGAAGACCUUAAAUUCCA | 1181 |
| AM12564-SS-NL | guccaauuAfAfCfaccaauagca | 843 | GUCCAAUUAACACCAAUAGCA | 1182 |
| AM12566-SS-NL | guccaagaUfGfGfuauuucuacu | 844 | GUCCAAGAUGGUAUUUCUACU | 1183 |
| AM12568-SS-NL | ca_2NagauggUfAfUfuucuacuaca | 845 | CAAGAUGGUAUUUCUACUACA | 1184 |
| AM12570-SS-NL | gugaauacAfCfCfaaaagaucaa | 846 | GUGAAUACACCAAAAGAUCAA | 1185 |
| AM12572-SS-NL | cugucacuAfAfGfaaaucuicua | 847 | CUGUCACUAAGAAAUCUICUA | 1186 |
| AM12574-SS-NL | ccacuaaaGfCfAfuacaauguaa | 848 | CCACUAAAGCAUACAAUGUAA | 1187 |
| AM12576-SS-NL | gcagacaaGfGfAfacugauuaca | 849 | GCAGACAAGGAACUGAUUACA | 1188 |
| AM12578-SS-NL | ggacaaggAfAfCfugauuacaaa | 850 | GGACAAGGAACUGAUUACAAA | 1189 |
| AM12580-SS-NL | ggaacugaUfUfAfcaaacauuga | 851 | GGAACUGAUUACAAACAUUGA | 1190 |
| AM12582-SS-NL | gcugaauaAfGfCfauauugacia | 852 | GCUGAAUAAGCAUAUUGACIA | 1191 |
| AM13119-SS-NL | gscuucuuaAfGfAfgugcuuauga | 853 | GCUUCUUAAGAGUGCUUAUGA | 1192 |
| AM13121-SS-NL | csuuagacaAfUfGfucuuaucuaa | 854 | CUUAGACAAUGUCUUAUCUAA | 1193 |
| AM13123-SS-NL | gscauuaauGfGfCfaaucuucaua | 855 | GCAUUAAUGGCAAUCUUCAUA | 1194 |
| AM13125-SS-NL | gsaugcuuaCfGfUfuaauacguuu | 856 | GAUGCUUACGUUAAUACGUUU | 1195 |
| AM13127-SS-NL | gscaccuuuGfAfCfaaucuuaaga | 857 | GCACCUUUGACAAUCUUAAGA | 1196 |
| AM13129-SS-NL | gsgaaguagUfGfGfaaaauccuaa | 858 | GGAAGUAGUGGAAAAUCCUAA | 1137 |
| AM13130-SS-NL | cscuuuugaUfGfUfuguuagacaa | 859 | CCUUUUGAUGUUGUUAGACAA | 1172 |
| AM13131-SS-NL | usgguaaugCfUfUfuagaucaaga | 860 | UGGUAAUGCUUUAGAUCAAGA | 1173 |
| AM13132-SS-NL | csaagcuauGfAfCfccaaauguau | 861 | CAAGCUAUGACCCAAAUGUAU | 1139 |
| AM13133-SS-NL | gsuccaagaUfGfGfuauuucuacu | 862 | GUCCAAGAUGGUAUUUCUACU | 1183 |
| AM13134-SS-NL | csaagauggUfAfUfuucuacuaca | 863 | CAAGAUGGUAUUUCUACUACA | 1184 |
| AM13135-SS-NL | cscacuaaaGfCfAfuacaauguaa | 864 | CCACUAAAGCAUACAAUGUAA | 1187 |
| AM13136-SS-NL | gsgacaaggAfAfCfugauuacaaa | 865 | GGACAAGGAACUGAUUACAAA | 1189 |
| AM13158-SS-NL | gscaugguaCfCfAfcauauaucaa | 866 | GCAUGGUACCACAUAUAUCAA | 1141 |
| AM13159-SS-NL | gsuacugacAfUfUfagauaaucaa | 867 | GUACUGACAUUAGAUAAUCAA | 1197 |
| AM13161-SS-NL | gsgauguaaAfCfUfuacauagcua | 868 | GGAUGUAAACUUACAUAGCUA | 1145 |
| AM13162-SS-NL | csauacaauGfCfUfaguuaaacaa | 869 | CAUACAAUGCUAGUUAAACAA | 1175 |
| AM13542-SS-NL | usgcuguggUfuAfuAfccuacuaa | 870 | UGCUGUGGUUAUACCUACUAA | 1198 |
| AM13544-SS-NL | gscaaucUfuAfaGfacacuucuuu | 871 | GCAAUCUUAAGACACUUCUUU | 1199 |
| AM13546-SS-NL | gscugaaUfaAfgCfauauugacia | 872 | GCUGAAUAAGCAUAUUGACIA | 1191 |
| AM14660-SS-NL | gcuucuuaAfGfAfgugcuuauga | 873 | GCUUCUUAAGAGUGCUUAUGA | 1192 |
| AM14661-SS-NL | cuucuuaaGfAfGfugcuuaugaa | 874 | CUUCUUAAGAGUGCUUAUGAA | 1200 |
| AM14663-SS-NL | cuuagacaAfUfGfucuuaucuaa | 875 | CUUAGACAAUGUCUUAUCUAA | 1193 |
| AM14664-SS-NL | gcaccuuuGfAfCfaaucuuaaga | 876 | GCACCUUUGACAAUCUUAAGA | 1196 |
| AM14665-SS-NL | ggaaguagUfGfGfaaaauccuaa | 877 | GGAAGUAGUGGAAAAUCCUAA | 1137 |
| AM14691-SS-NL | gsgsaaguagUfGfGfaaaauccuasa | 878 | GGAAGUAGUGGAAAAUCCUAA | 1137 |
| AM14860-SS-NL | gsuccaagaUfGfGfuauuucuaca | 879 | GUCCAAGAUGGUAUUUCUACA | 1201 |
| AM15013-SS-NL | cauacaauGfCfUfaguuaaacaa | 880 | CAUACAAUGCUAGUUAAACAA | 1175 |
| AM15014-SS-NL | caagauggUfAfUfuucuacuaca | 881 | CAAGAUGGUAUUUCUACUACA | 1184 |
| AM15015-SS-NL | ggacaaggAfAfCfugauuacaaa | 882 | GGACAAGGAACUGAUUACAAA | 1189 |
| AM15016-SS-NL | ccacuaaaGfCfAfuacaauguaa | 883 | CCACUAAAGCAUACAAUGUAA | 1187 |
| AM15017-SS-NL | guccaagaUfGfGfuauuucuacu | 884 | GUCCAAGAUGGUAUUUCUACU | 1183 |
| AM15564-SS-NL | ggaaguagUfgGfaAfaauccuaa | 885 | GGAAGUAGUGGAAAAUCCUAA | 1137 |
| AM15567-SS-NL | cgaaguagUfgGfaAfaauccuaa | 886 | CGAAGUAGUGGAAAAUCCUAA | 1202 |
| AM15571-SS-NL | cauacaauGfcUfaGfuuaaacaa | 887 | CAUACAAUGCUAGUUAAACAA | 1175 |
| AM15573-SS-NL | cguacaauGfcUfaGfuuaaacaa | 888 | CGUACAAUGCUAGUUAAACAA | 1203 |
| AM15577-SS-NL | guccaagaUfgGfuAfuuucuacu | 889 | GUCCAAGAUGGUAUUUCUACU | 1183 |
| AM15581-SS-NL | guccaagaUfgGfuAfuuucuaca | 890 | GUCCAAGAUGGUAUUUCUACA | 1201 |
| AM15796-SS-NL | ggacaaggAfaCfuGfauuacaaa | 891 | GGACAAGGAACUGAUUACAAA | 1189 |
| AM15800-SS-NL | cgacaaggAfaCfuGfauuacaaa | 892 | CGACAAGGAACUGAUUACAAA | 1204 |
| AM15802-SS-NL | cauaaucaGfGfAfuguaaacuua | 893 | CAUAAUCAGGAUGUAAACUUA | 1144 |
| AM15805-SS-NL | cauaaucaGfgAfuGfuaaacuua | 894 | CAUAAUCAGGAUGUAAACUUA | 1144 |
| AM15806-SS-NL | cguaaucaGfgAfuGfuaaacuua | 895 | CGUAAUCAGGAUGUAAACUUA | 1205 |
| AM15809-SS-NL | ggauguaaAfCfUfuacauagcua | 896 | GGAUGUAAACUUACAUAGCUA | 1145 |
| AM15811-SS-NL | ggauguaaAfcUfuAfcauagcua | 897 | GGAUGUAAACUUACAUAGCUA | 1145 |
| AM15814-SS-NL | gcaccuuuGfaCfaAfucuuaaga | 898 | GCACCUUUGACAAUCUUAAGA | 1196 |
| AM15817-SS-NL | ugcuguggUfUfAfuaccuacuaa | 899 | UGCUGUGGUUAUACCUACUAA | 1198 |
| AM15819-SS-NL | gacaaucuUfAfAfgacacuucuu | 900 | GACAAUCUUAAGACACUUCUU | 1206 |
| AM15821-SS-NL | caugggcaCfAfCfuuucuuauga | 901 | CAUGGGCACACUUUCUUAUGA | 1207 |
| AM15823-SS-NL | acagaaauUfGfAfcccuaaguua | 902 | ACAGAAAUUGACCCUAAGUUA | 1208 |
| AM15825-SS-NL | gaugcuuaCfGfUfuaauacguuu | 903 | GAUGCUUACGUUAAUACGUUU | 1195 |
| AM15827-SS-NL | caagcuauGfAfCfccaaauguau | 904 | CAAGCUAUGACCCAAAUGUAU | 1139 |
| AM15829-SS-NL | ugucgauuCfAfGfaucuuaauga | 905 | UGUCGAUUCAGAUCUUAAUGA | 1209 |
| AM15831-SS-NL | gcuugcuuUfCfGfugguauucuu | 906 | GCUUGCUUUCGUGGUAUUCUU | 1160 |
| AM16518-SS-NL | agacaaggAfaCfuGfauuacaaa | 907 | AGACAAGGAACUGAUUACAAA | 1210 |
| AM16520-SS-NL | cguaaucaGfGfAfuguaaacuua | 908 | CGUAAUCAGGAUGUAAACUUA | 1205 |
| AM16965-SS-NL | csgaaguagUfgGfaAfaauccuaa | 909 | CGAAGUAGUGGAAAAUCCUAA | 1202 |
| AM16967-SS-NL | gsgacaaggAfaCfuGfauuacaaa | 910 | GGACAAGGAACUGAUUACAAA | 1189 |
| AM16968-SS-NL | usgcuguggUfUfAfuaccuacuaa | 911 | UGCUGUGGUUAUACCUACUAA | 1198 |
| AM16969-SS-NL | csauacaauGfcUfaGfuuaaacaa | 912 | CAUACAAUGCUAGUUAAACAA | 1175 |
| AM16970-SS-NL | csguaaucaGfgAfuGfuaaacuua | 913 | CGUAAUCAGGAUGUAAACUUA | 1205 |

a_2N = 2-aminoadenosine nucleotide;
I = hypoxanthine (inosine) nucleotide

TABLE 5
CoV RNAi Agent Sense Strand Sequences (Shown With (TriAlk14) Linker or
(NAG37) Targeting Ligand (see Table 11 for structure information.))

| | | | Underlying Base | |
|---|---|---|---|---|
| | | | Sequence (5′ → 3′) | |
| | | SEQ ID | (Shown as an Unmodified | SEQ ID |
| Strand ID | Modified Sense Strand (5′ → 3′) | NO. | Nucleotide Sequence) | NO. |
| AM11996-SS | (invAb)sgacacacgUfCfCfaacucaguuus(invAb) | 914 | GACACACGUCCAACUCAGUUU | 1135 |
| AM11998-SS | (invAb)sggaagaagUfAfGfuggaaaaucas(invAb) | 915 | GGAAGAAGUAGUGGAAAAUCA | 1136 |
| AM12000-SS | (invAb)sggaaguagUfGfGfaaaauccuaas(invAb) | 916 | GGAAGUAGUGGAAAAUCCUAA | 1137 |
| AM12002-SS | (invAb)sgucaugugGfUfAfguguuiguuus(invAb) | 917 | GUCAUGUGGUAGUGUUIGUUU | 1138 |
| AM12004-SS | (invAb)scaagcuauGfAfCfccaaauguaus(invAb) | 918 | CAAGCUAUGACCCAAAUGUAU | 1139 |
| AM12006-SS | (invAb)sgacaugguAfCfCfacauauaucas(invAb) | 919 | GACAUGGUACCACAUAUAUCA | 1140 |
| AM12008-SS | (invAb)sgcaugguaCfCfAfcauauaucaas(invAb) | 920 | GCAUGGUACCACAUAUAUCAA | 1141 |
| AM12010-SS | (invAb)sgguacauaAfUfCfaggauguaaas(invAb) | 921 | GGUACAUAAUCAGGAUGUAAA | 1142 |
| AM12012-SS | (invAb)sgcauaaucAfGfGfauguaaacuus(invAb) | 922 | GCAUAAUCAGGAUGUAAACUU | 1143 |
| AM12014-SS | (invAb)sca_2NuaaucaGfGfAfuguaaacuuas(invAb) | 923 | CAUAAUCAGGAUGUAAACUUA | 1144 |
| AM12016-SS | (invAb)sggauguaaAfCfUfuacauagcuas(invAb) | 924 | GGAUGUAAACUUACAUAGCUA | 1145 |
| AM12018-SS | (invAb)sgguaaggcUfAfGfacuuuauua_2Nus(invAb) | 925 | GGUAAGGCUAGACUUUAUUAU | 1146 |
| AM12020-SS | (invAb)suggugucuCfUfAfucuguaguaas(invAb) | 926 | UGGUGUCUCUAUCUGUAGUAA | 1147 |
| AM12022-SS | (invAb)sgucucuauCfUfGfuaguacuauas(invAb) | 927 | GUCUCUAUCUGUAGUACUAUA | 1148 |
| AM12024-SS | (invAb)sgcucuaucUfGfUfaguacuaugas(invAb) | 928 | GCUCUAUCUGUAGUACUAUGA | 1149 |
| AM12026-SS | (invAb)sgcuaucugUfAfGfuacuaugacas(invAb) | 929 | GCUAUCUGUAGUACUAUGACA | 1150 |
| AM12028-SS | (invAb)sgucuagcaAfUfGfuugcaaa_2Nuuas(invAb) | 930 | GUCUAGCAAUGUUGCAAAUUA | 1151 |
| AM12030-SS | (invAb)sga_2NagacucAfUfCfucuaugaugas(invAb) | 931 | GAAGACUCAUCUCUAUGAUGA | 1152 |
| AM12032-SS | (invAb)sguggagucAfCfAfuuaauuggaas(invAb) | 932 | GUGGAGUCACAUUAAUUGGAA | 1153 |
| AM12034-SS | (invAb)sggaugaguAfCfGfaacuuauguas(invAb) | 933 | GGAUGAGUACGAACUUAUGUA | 1154 |
| AM12036-SS | (invAb)sacgaacuuAfUfGfuacucauucas(invAb) | 934 | ACGAACUUAUGUACUCAUUCA | 1155 |
| AM12038-SS | (invAb)scgaacuuaUfGfUfacucauucgus(invAb) | 935 | CGAACUUAUGUACUCAUUCGU | 1156 |
| AM12040-SS | (invAb)scuuauguaCfUfCfauucguuucas(invAb) | 936 | CUUAUGUACUCAUUCGUUUCA | 1157 |
| AM12042-SS | (invAb)scuuauguaCfUfCfauuciuuucas(invAb) | 937 | CUUAUGUACUCAUUCIUUUCA | 1158 |
| AM12043-SS | (invAb)sguaguuaaUfAfGfcguacuucuus(invAb) | 938 | GUAGUUAAUAGCGUACUUCUU | 1159 |
| AM12045-SS | (invAb)sgcuugcuuUfCfGfugguauucuus(invAb) | 939 | GCUUGCUUUCGUGGUAUUCUU | 1160 |
| AM12047-SS | (invAb)sguacacuaGfCfCfauccuuacuas(invAb) | 940 | GUACACUAGCCAUCCUUACUA | 1161 |
| AM12049-SS | (invAb)sguacugcuGfCfAfauauuguuaas(invAb) | 941 | GUACUGCUGCAAUAUUGUUAA | 1162 |
| AM12051-SS | (invAb)scugcugcaAfUfAfuuguuaacgus(invAb) | 942 | CUGCUGCAAUAUUGUUAACGU | 1163 |
| AM12053-SS | (invAb)sugcugcaaUfAfUfuguuaacguas(invAb) | 943 | UGCUGCAAUAUUGUUAACGUA | 1164 |
| AM12055-SS | (invAb)sugcugcaaUfa_2NUfuguuaacguas(invAb) | 944 | UGCUGCAAUAUUGUUAACGUA | 1164 |
| AM12056-SS | (invAb)sccugaucuUfCfUfggucuaaacas(invAb) | 945 | CCUGAUCUUCUGGUCUAAACA | 1165 |
| AM12058-SS | (invAb)scaucacgaAfCfGfcuuucuuauus(invAb) | 946 | CAUCACGAACGCUUUCUUAUU | 1166 |
| AM12060-SS | (invAb)scaucacgaAfCfGfcuuucuua_2Nuus(invAb) | 947 | CAUCACGAACGCUUUCUUAUU | 1166 |
| AM12061-SS | (invAb)scgaacgcuUfUfCfuuauuacaaas(invAb) | 948 | CGAACGCUUUCUUAUUACAAA | 1167 |
| AM12063-SS | (invAb)sgacaguaaGfUfGfacaacagauas(invAb) | 949 | GACAGUAAGUGACAACAGAUA | 1168 |
| AM12065-SS | (invAb)scaguaaguGfAfCfaacagauguus(invAb) | 950 | CAGUAAGUGACAACAGAUGUU | 1169 |
| AM12067-SS | (invAb)sca_2NaauuggAfUfGfacaaagaucas(invAb) | 951 | CAAAUUGGAUGACAAAGAUCA | 1170 |
| AM12069-SS | (invAb)scucacauaGfCfAfaucuuuaa_2Nuas(invAb) | 952 | CUCACAUAGCAAUCUUUAAUA | 1171 |
| AM12468-SS | (invAb)sccuuuugaUfGfUfuguuagacaas(invAb) | 953 | CCUUUUGAUGUUGUUAGACAA | 1172 |
| AM12470-SS | (invAb)sugguaaugCfUfUfuagaucaagas(invAb) | 954 | UGGUAAUGCUUUAGAUCAAGA | 1173 |
| AM12472-SS | (invAb)sgcauacaaUfGfCfuaguuaaacas(invAb) | 955 | GCAUACAAUGCUAGUUAAACA | 1174 |
| AM12474-SS | (invAb)sca_2NuacaauGfCfUfaguuaaacaas(invAb) | 956 | CAUACAAUGCUAGUUAAACAA | 1175 |
| AM12476-SS | (invAb)sgugcauaaUfGfUfcugauagagas(invAb) | 957 | GUGCAUAAUGUCUGAUAGAGA | 1176 |
| AM12478-SS | (invAb)sggucgauuCfAfGfaucuuaaugas(invAb) | 958 | GGUCGAUUCAGAUCUUAAUGA | 1177 |
| AM12480-SS | (invAb)sgguccagaUfGfAfccaaauuggas(invAb) | 959 | GGUCCAGAUGACCAAAUUGGA | 1178 |
| AM12482-SS | (invAb)sgccgcaaaUfUfGfcacaauuugas(invAb) | 960 | GCCGCAAAUUGCACAAUUUGA | 1179 |
| AM12484-SS | (invAb)sgugacgcaUfAfCfaaaacauucas(invAb) | 961 | GUGACGCAUACAAAACAUUCA | 1180 |
| AM12562-SS | (invAb)sca_2NaggaagAfCfCfuuaaauuccas(invAb) | 962 | CAAGGAAGACCUUAAAUUCCA | 1181 |
| AM12564-SS | (invAb)sguccaauuAfAfCfaccaauagcas(invAb) | 963 | GUCCAAUUAACACCAAUAGCA | 1182 |
| AM12566-SS | (invAb)sguccaagaUfGfGfuauuucuacus(invAb) | 964 | GUCCAAGAUGGUAUUUCUACU | 1183 |
| AM12568-SS | (invAb)sca_2NagauggUfAfUfuucuacuacas(invAb) | 965 | CAAGAUGGUAUUUCUACUACA | 1184 |
| AM12570-SS | (invAb)sgugaauacAfCfCfaaaagaucaas(invAb) | 966 | GUGAAUACACCAAAAGAUCAA | 1185 |
| AM12572-SS | (invAb)scugucacuAfAfGfaaaucuicuas(invAb) | 967 | CUGUCACUAAGAAAUCUICUA | 1186 |
| AM12574-SS | (invAb)sccacuaaaGfCfAfuacaauguaas(invAb) | 968 | CCACUAAAGCAUACAAUGUAA | 1187 |
| AM12576-SS | (invAb)sgcagacaaGfGfAfacugauuacas(invAb) | 969 | GCAGACAAGGAACUGAUUACA | 1188 |
| AM12578-SS | (invAb)sggacaaggAfAfCfugauuacaaas(invAb) | 970 | GGACAAGGAACUGAUUACAAA | 1189 |
| AM12580-SS | (invAb)sggaacugaUfUfAfcaaacauugas(invAb) | 971 | GGAACUGAUUACAAACAUUGA | 1190 |
| AM12582-SS | (invAb)sgcugaauaAfGfCfauauugacias(invAb) | 972 | GCUGAAUAAGCAUAUUGACIA | 1191 |
| AM13119-SS | (TriAlk14)gscuucuuaAfGfAfgugcuuaugas(invAb) | 973 | GCUUCUUAAGAGUGCUUAUGA | 1192 |
| AM13121-SS | (TriAlk14)csuuagacaAfUfGfucuuaucuaas(invAb) | 974 | CUUAGACAAUGUCUUAUCUAA | 1193 |
| AM13123-SS | (TriAlk14)gscauuaauGfGfCfaaucuucauas(invAb) | 975 | GCAUUAAUGGCAAUCUUCAUA | 1194 |
| AM13125-SS | (TriAlk14)gsaugcuuaCfGfUfuaauacguuus(invAb) | 976 | GAUGCUUACGUUAAUACGUUU | 1195 |
| AM13127-SS | (TriAlk14)gscaccuuuGfAfCfaaucuuaagas(invAb) | 977 | GCACCUUUGACAAUCUUAAGA | 1196 |
| AM13129-SS | (TriAlk14)gsgaaguagUfGfGfaaaauccuaas(invAb) | 978 | GGAAGUAGUGGAAAAUCCUAA | 1137 |
| AM13130-SS | (TriAlk14)cscuuuugaUfGfUfuguuagacaas(invAb) | 979 | CCUUUUGAUGUUGUUAGACAA | 1172 |
| AM13131-SS | (TriAlk14)usgguaaugCfUfUfuagaucaagas(invAb) | 980 | UGGUAAUGCUUUAGAUCAAGA | 1173 |
| AM13132-SS | (TriAlk14)csaagcuauGfAfCfccaaauguaus(invAb) | 981 | CAAGCUAUGACCCAAAUGUAU | 1139 |
| AM13133-SS | (TriAlk14)gsuccaagaUfGfGfuauuucuacus(invAb) | 982 | GUCCAAGAUGGUAUUUCUACU | 1183 |
| AM13134-SS | (TriAlk14)csaagauggUfAfUfuucuacuacas(invAb) | 983 | CAAGAUGGUAUUUCUACUACA | 1184 |
| AM13135-SS | (TriAlk14)cscacuaaaGfCfAfuacaauguaas(invAb) | 984 | CCACUAAAGCAUACAAUGUAA | 1187 |
| AM13136-SS | (TriAlk14)gsgacaaggAfAfCfugauuacaaas(invAb) | 985 | GGACAAGGAACUGAUUACAAA | 1189 |
| AM13158-SS | (TriAlk14)gscaugguaCfCfAfcauauaucaas(invAb) | 986 | GCAUGGUACCACAUAUAUCAA | 1141 |
| AM13159-SS | (TriAlk14)gsuacugacAfUfUfagauaaucaas(invAb) | 987 | GUACUGACAUUAGAUAAUCAA | 1197 |
| AM13161-SS | (TriAlk14)gsgauguaaAfCfUfuacauagcuas(invAb) | 988 | GGAUGUAAACUUACAUAGCUA | 1145 |
| AM13162-SS | (TriAlk14)csauacaauGfCfUfaguuaaacaas(invAb) | 989 | CAUACAAUGCUAGUUAAACAA | 1175 |
| AM13542-SS | (TriAlk14)usgcuguggUfuAfuAfccuacuaas(invAb) | 990 | UGCUGUGGUUAUACCUACUAA | 1198 |
| AM13544-SS | (TriAlk14)gscaaucUfuAfaGfacacuucuuus(invAb) | 991 | GCAAUCUUAAGACACUUCUUU | 1199 |
| AM13546-SS | (TriAlk14)gscugaaUfaAfgCfauauugacias(invAb) | 992 | GCUGAAUAAGCAUAUUGACIA | 1191 |
| AM14660-SS | (NAG37)s(invAb)sgcuucuuaAfGfAfgugcuuaugas(invAb) | 993 | GCUUCUUAAGAGUGCUUAUGA | 1192 |
| AM14661-SS | (NAG37)s(invAb)scuucuuaaGfAfGfugcuuaugaas(invAb) | 994 | CUUCUUAAGAGUGCUUAUGAA | 1200 |
| AM14663-SS | (NAG37)s(invAb)scuuagacaAfUfGfucuuaucuaas(invAb) | 995 | CUUAGACAAUGUCUUAUCUAA | 1193 |
| AM14664-SS | (NAG37)s(invAb)sgcaccuuuGfAfCfaaucuuaagas(invAb) | 996 | GCACCUUUGACAAUCUUAAGA | 1196 |
| AM14665-SS | (NAG37)s(invAb)sggaaguagUfGfGfaaaauccuaas(invAb) | 997 | GGAAGUAGUGGAAAAUCCUAA | 1137 |
| AM14691-SS | (invAb)sgsgsaaguagUfGfGfaaaauccuasa | 998 | GGAAGUAGUGGAAAAUCCUAA | 1137 |
| AM14860-SS | (TriAlk14)gsuccaagaUfGfGfuauuucuacas(invAb) | 999 | GUCCAAGAUGGUAUUUCUACA | 1201 |
| AM15013-SS | (NAG37)s(invAb)scauacaauGfCfUfaguuaaacaas(invAb) | 1000 | CAUACAAUGCUAGUUAAACAA | 1175 |
| AM15014-SS | (NAG37)s(invAb)scaagauggUfAfUfuucuacuacas(invAb) | 1001 | CAAGAUGGUAUUUCUACUACA | 1184 |
| AM15015-SS | (NAG37)s(invAb)sggacaaggAfAfCfugauuacaaas(invAb) | 1002 | GGACAAGGAACUGAUUACAAA | 1189 |
| AM15016-SS | (NAG37)s(invAb)sccacuaaaGfCfAfuacaauguaas(invAb) | 1003 | CCACUAAAGCAUACAAUGUAA | 1187 |
| AM15017-SS | (NAG37)s(invAb)sguccaagaUfGfGfuauuucuacus(invAb) | 1004 | GUCCAAGAUGGUAUUUCUACU | 1183 |
| AM15564-SS | (NAG37)s(invAb)sggaaguagUfgGfaAfaauccuaas(invAb) | 1005 | GGAAGUAGUGGAAAAUCCUAA | 1137 |
| AM15567-SS | (NAG37)s(invAb)scgaaguagUfgGfaAfaauccuaas(invAb) | 1006 | CGAAGUAGUGGAAAAUCCUAA | 1202 |
| AM15571-SS | (NAG37)s(invAb)scauacaauGfcUfaGfuuaaacaas(invAb) | 1007 | CAUACAAUGCUAGUUAAACAA | 1175 |
| AM15573-SS | (NAG37)s(invAb)scguacaauGfcUfaGfuuaaacaas(invAb) | 1008 | CGUACAAUGCUAGUUAAACAA | 1203 |
| AM15577-SS | (NAG37)s(invAb)sguccaagaUfgGfuAfuuucuacus(invAb) | 1009 | GUCCAAGAUGGUAUUUCUACU | 1183 |
| AM15581-SS | (NAG37)s(invAb)sguccaagaUfgGfuAfuuucuacas(invAb) | 1010 | GUCCAAGAUGGUAUUUCUACA | 1201 |
| AM15796-SS | (NAG37)s(invAb)sggacaaggAfaCfuGfauuacaaas(invAb) | 1011 | GGACAAGGAACUGAUUACAAA | 1189 |
| AM15800-SS | (NAG37)s(invAb)scgacaaggAfaCfuGfauuacaaas(invAb) | 1012 | CGACAAGGAACUGAUUACAAA | 1204 |
| AM15802-SS | (NAG37)s(invAb)scauaaucaGfGfAfuguaaacuuas(invAb) | 1013 | CAUAAUCAGGAUGUAAACUUA | 1144 |
| AM15805-SS | (NAG37)s(invAb)scauaaucaGfgAfuGfuaaacuuas(invAb) | 1014 | CAUAAUCAGGAUGUAAACUUA | 1144 |
| AM15806-SS | (NAG37)s(invAb)scguaaucaGfgAfuGfuaaacuuas(invAb) | 1015 | CGUAAUCAGGAUGUAAACUUA | 1205 |
| AM15809-SS | (NAG37)s(invAb)sggauguaaAfCfUfuacauagcuas(invAb) | 1016 | GGAUGUAAACUUACAUAGCUA | 1145 |
| AM15811-SS | (NAG37)s(invAb)sggauguaaAfcUfuAfcauagcuas(invAb) | 1017 | GGAUGUAAACUUACAUAGCUA | 1145 |
| AM15814-SS | (NAG37)s(invAb)sgcaccuuuGfaCfaAfucuuaagas(invAb) | 1018 | GCACCUUUGACAAUCUUAAGA | 1196 |
| AM15817-SS | (NAG37)s(invAb)sugcuguggUfUfAfuaccuacuaas(invAb) | 1019 | UGCUGUGGUUAUACCUACUAA | 1198 |
| AM15819-SS | (NAG37)s(invAb)sgacaaucuUfAfAfgacacuucuus(invAb) | 1020 | GACAAUCUUAAGACACUUCUU | 1206 |
| AM15821-SS | (NAG37)s(invAb)scaugggcaCfAfCfuuucuuaugas(invAb) | 1021 | CAUGGGCACACUUUCUUAUGA | 1207 |
| AM15823-SS | (NAG37)s(invAb)sacagaaauUfGfAfcccuaaguuas(invAb) | 1022 | ACAGAAAUUGACCCUAAGUUA | 1208 |
| AM15825-SS | (NAG37)s(invAb)sgaugcuuaCfGfUfuaauacguuus(invAb) | 1023 | GAUGCUUACGUUAAUACGUUU | 1195 |
| AM15827-SS | (NAG37)s(invAb)scaagcuauGfAfCfccaaauguaus(invAb) | 1024 | CAAGCUAUGACCCAAAUGUAU | 1139 |
| AM15829-SS | (NAG37)s(invAb)sugucgauuCfAfGfaucuuaaugas(invAb) | 1025 | UGUCGAUUCAGAUCUUAAUGA | 1209 |
| AM15831-SS | (NAG37)s(invAb)sgcuugcuuUfCfGfugguauucuus(invAb) | 1026 | GCUUGCUUUCGUGGUAUUCUU | 1160 |
| AM16518-SS | (NAG37)s(invAb)sagacaaggAfaCfuGfauuacaaas(invAb) | 1027 | AGACAAGGAACUGAUUACAAA | 1210 |
| AM16520-SS | (NAG37)s(invAb)scguaaucaGfGfAfuguaaacuuas(invAb) | 1028 | CGUAAUCAGGAUGUAAACUUA | 1205 |
| AM16965-SS | (TriAlk14)csgaaguagUfgGfaAfaauccuaas(invAb) | 1029 | CGAAGUAGUGGAAAAUCCUAA | 1202 |
| AM16967-SS | (TriAlk14)gsgacaaggAfaCfuGfauuacaaas(invAb) | 1030 | GGACAAGGAACUGAUUACAAA | 1189 |
| AM16968-SS | (TriAlk14)usgcuguggUfUfAfuaccuacuaas(invAb) | 1031 | UGCUGUGGUUAUACCUACUAA | 1198 |
| AM16969-SS | (TriAlk14)csauacaauGfcUfaGfuuaaacaas(invAb) | 1032 | CAUACAAUGCUAGUUAAACAA | 1175 |
| AM16970-SS | (TriAlk14)csguaaucaGfgAfuGfuaaacuuas(invAb) | 1033 | CGUAAUCAGGAUGUAAACUUA | 1205 |

a_2N = 2-aminoadenosine nucleotide;
I = hypoxanthine (inosine) nucleotide

TABLE 6
CoV RNAi Agent Sense Strand Sequences (Shown with Targeting Ligand
Conjugate. The structure of αvβ6-SM6.1 is shown in
Table 11, and the structure of Tri-SM6.1-αvβ6-TA14 is shown in FIG. 1.)

| | | | Corresponding |
|---|---|---|---|
| | | | Sense Strand |
| | | | AM Number |
| | | | Without Linker |
| | | SEQ ID | or Conjugate |
| Strand ID | Modified Sense Strand (5′ → 3′) | NO. | (See Table 4) |
| CS001679 | Tri-SM6.1-avb6-TA14-gscuucuuaAfGfAfgugcuuaugas(invAb) | 1034 | AM13119-SS-NL |
| CS001681 | Tri-SM6.1-avb6-TA14-csuuagacaAfUfGfucuuaucuaas(invAb) | 1035 | AM13121-SS-NL |
| CS001683 | Tri-SM6.1-avb6-TA14-gscauuaauGfGfCfaaucuucauas(invAb) | 1036 | AM13123-SS-NL |
| CS001685 | Tri-SM6.1-avb6-TA14-gsaugcuuaCfGfUfuaauacguuus(invAb) | 1037 | AM13125-SS-NL |
| CS001687 | Tri-SM6.1-avb6-TA14-gscaccuuuGfAfCfaaucuuaagas(invAb) | 1038 | AM13127-SS-NL |
| CS001689 | Tri-SM6.1-avb6-TA14-gsgaaguagUfGfGfaaaauccuaas(invAb) | 1039 | AM13129-SS-NL |
| CS001691 | Tri-SM6.1-avb6-TA14-cscuuuugaUfGfUfuguuagacaas(invAb) | 1040 | AM13130-SS-NL |
| CS001693 | Tri-SM6.1-avb6-TA14-usgguaaugCfUfUfuagaucaagas(invAb) | 1041 | AM13131-SS-NL |
| CS001695 | Tri-SM6.1-avb6-TA14-csaagcuauGfAfCfccaaauguaus(invAb) | 1042 | AM13132-SS-NL |
| CS001697 | Tri-SM6.1-avb6-TA14-gsuccaagaUfGfGfuauuucuacus(invAb) | 1043 | AM13133-SS-NL |
| CS001699 | Tri-SM6.1-avb6-TA14-csaagauggUfAfUfuucuacuacas(invAb) | 1044 | AM13134-SS-NL |
| CS001701 | Tri-SM6.1-avb6-TA14-cscacuaaaGfCfAfuacaauguaas(invAb) | 1045 | AM13135-SS-NL |
| CS001703 | Tri-SM6.1-avb6-TA14-gsgacaaggAfAfCfugauuacaaas(invAb) | 1046 | AM13136-SS-NL |
| CS001705 | Tri-SM6.1-avb6-TA14-gscaugguaCfCfAfcauauaucaas(invAb) | 1047 | AM13158-SS-NL |
| CS001707 | Tri-SM6.1-avb6-TA14-gsuacugacAfUfUfagauaaucaas(invAb) | 1048 | AM13159-SS-NL |
| CS001709 | Tri-SM6.1-avb6-TA14-gsgauguaaAfCfUfuacauagcuas(invAb) | 1049 | AM13161-SS-NL |
| CS001711 | Tri-SM6.1-avb6-TA14-csauacaauGfCfUfaguuaaacaas(invAb) | 1050 | AM13162-SS-NL |
| CS001891 | Tri-SM6.1-avb6-TA14-usgcuguggUfuAfuAfccuacuaas(invAb) | 1051 | AM13542-SS-NL |
| CS001893 | Tri-SM6.1-avb6-TA14-gscaaucUfuAfaGfacacuucuuus(invAb) | 1052 | AM13544-SS-NL |
| CS001895 | Tri-SM6.1-avb6-TA14-gscugaaUfaAfgCfauauugacias(invAb) | 1053 | AM13546-SS-NL |
| CS002495 | Tri-SM6.1-avb6-TA14-gsuccaagaUfGfGfuauuucuacas(invAb) | 1054 | AM14860-SS-NL |
| CS003334 | Tri-SM6.1-avb6-TA14-csgaaguagUfgGfaAfaauccuaas(invAb) | 1055 | AM16965-SS-NL |
| CS003337 | Tri-SM6.1-avb6-TA14-gsgacaaggAfaCfuGfauuacaaas(invAb) | 1056 | AM16967-SS-NL |
| CS003340 | Tri-SM6.1-avb6-TA14-usgcuguggUfUfAfuaccuacuaas(invAb) | 1057 | AM16968-SS-NL |
| CS003342 | Tri-SM6.1-avb6-TA14-csauacaauGfcUfaGfuuaaacaas(invAb) | 1058 | AM16969-SS-NL |
| CS003344 | Tri-SM6.1-avb6-TA14-csguaaucaGfgAfuGfuaaacuuas(invAb) | 1059 | AM16970-SS-NL |

[0210] The CoV RNAi agents disclosed herein are formed by annealing an antisense strand with a sense strand. A sense strand containing a sequence listed in Table 2, Table 4, Table 5, or Table 6 can be hybridized to any antisense strand containing a sequence listed in Table 2 or Table 3, provided the two sequences have a region of at least 85% complementarity over a contiguous 16, 17, 18, 19, 20, or 21 nucleotide sequence.

[0211] As shown in Table 5 above, certain of the example CoV RNAi agent nucleotide sequences are shown to further include reactive linking groups at one or both of the 5′ terminal end and the 3′ terminal end of the sense strand. For example, many of the CoV RNAi agent sense strand sequences shown in Table 5 above have a (TriAlk14) linking group at the 5′ end of the nucleotide sequence. Other linking groups, such as an (NH2-C6) linking group or a (6-SS-6) or (C6-SS-C6) linking group, may be present as well or alternatively in certain embodiments. Such reactive linking groups are positioned to facilitate the linking of targeting ligands, targeting groups, and/or PK/PD modulators to the CoV RNAi agents disclosed herein. Linking or conjugation reactions are well known in the art and provide for formation of covalent linkages between two molecules or reactants. Suitable conjugation reactions for use in the scope of the inventions herein include, but are not limited to, amide coupling reaction, Michael addition reaction, hydrazone formation reaction, inverse-demand Diels-Alder cycloaddition reaction, oxime ligation, and Copper (I)-catalyzed or strain-promoted azide-alkyne cycloaddition reaction cycloaddition reaction.

[0212] In some embodiments, targeting ligands, such as the integrin targeting ligands shown in the examples and figures disclosed herein, can be synthesized as activated esters, such as tetrafluorophenyl (TFP) esters, which can be displaced by a reactive amino group (e.g., NH₂—C₆) to attach the targeting ligand to the CoV RNAi agents disclosed herein. In some embodiments, targeting ligands are synthesized as azides, which can be conjugated to a propargyl (e.g., TriAlk14) or DBCO group, for example, via Copper (I)-catalyzed or strain-promoted azide-alkyne cycloaddition reaction.

[0213] Additionally, certain of the nucleotide sequences can be synthesized with a dT nucleotide at the 3′ terminal end of the sense strand, followed by (3′→5′) a linker (e.g., C6-SS-C6). The linker can, in some embodiments, facilitate the linkage to additional components, such as, for example, a PK/PD modulator or one or more targeting ligands. As described herein, the disulfide bond of C6-SS-C6 is first reduced, removing the dT from the molecule, which can then facilitate the conjugation of the desired PK/PD modulator. The terminal dT nucleotide therefore is not a part of the fully conjugated construct.

[0214] In some embodiments, the antisense strand of a CoV RNAi agent disclosed herein differs by 0, 1, 2, or 3 nucleotides from any of the antisense strand sequences in Table 3 or Table 10. In some embodiments, the sense strand of a CoV RNAi agent disclosed herein differs by 0, 1, 2, or 3 nucleotides from any of the sense strand sequences in Table 4, Table 5, Table 6, or Table 10.

[0215] In some embodiments, a CoV RNAi agent antisense strand comprises a nucleotide sequence of any of the sequences in Table 2 or Table 3. In some embodiments, a CoV RNAi agent antisense strand comprises the sequence of nucleotides (from 5′ end→3′ end) 1-17, 2-17, 1-18, 2-18, 1-19, 2-19, 1-20, 2-20, 1-21, 2-21, 1-22, 2-22, 1-23, 2-23, 1-24, or 2-24 of any of the sequences in Table 2, Table 3, or Table 10. In certain embodiments, a CoV RNAi agent antisense strand comprises or consists of a modified sequence of any one of the modified sequences in Table 3 or Table 10.

[0216] In some embodiments, a CoV RNAi agent sense strand comprises the nucleotide sequence of any of the sequences in Table 2 or Table 4. In some embodiments, a CoV RNAi agent sense strand comprises the sequence of nucleotides (from 5′ end→3′ end) 1-17, 2-17, 3-17, 4-17, 1-18, 2-18, 3-18, 4-18, 1-19, 2-19, 3-19, 4-19, 1-20, 2-20, 3-20, 4-20, 1-21, 2-21, 3-21, 4-21, 1-22, 2-22, 3-22, 4-22, 1-23, 2-23, 3-23, 4-23, 1-24, 2-24, 3-24, or 4-24, of any of the sequences in Table 2, Table 4, Table 5, Table 6, or Table 10. In certain embodiments, a CoV RNAi agent sense strand comprises or consists of a modified sequence of any one of the modified sequences in Table 3 or Table 10.

[0217] For the RNAi agents disclosed herein, the nucleotide at position 1 of the antisense strand (from 5′ end→3′ end) can be perfectly complementary to a SARS-CoV-2 viral genome, or can be non-complementary to a SARS-CoV-2 viral genome. In some embodiments, the nucleotide at position 1 of the antisense strand (from 5′ end→3′ end) is a U, A, or dT (or a modified version of U, A or dT). In some embodiments, the nucleotide at position 1 of the antisense strand (from 5′ end→3′ end) forms an A:U or U:A base pair with the sense strand.

[0218] In some embodiments, a CoV RNAi agent antisense strand comprises the sequence of nucleotides (from 5′ end→3′ end) 2-18 or 2-19 of any of the antisense strand sequences in Table 2, Table 3, or Table 10. In some embodiments, a SARS-CoV-2 RNAi sense strand comprises the sequence of nucleotides (from 5′ end→3′ end) 1-17 or 1-18 of any of the sense strand sequences in Table 2, Table 4, Table 5, Table 6, or Table 10.

[0219] In some embodiments, a CoV RNAi agent includes (i) an antisense strand comprising the sequence of nucleotides (from 5′ end→3′ end) 2-18 or 2-19 of any of the antisense strand sequences in Table 2, Table 3, or Table 10, and (ii) a sense strand comprising the sequence of nucleotides (from 5′ end→3′ end) 1-17 or 1-18 of any of the sense strand sequences in Table 2, Table 4, Table 5, Table 6, or Table 10.

[0220] A sense strand containing a sequence listed in Table 2 or Table 4 can be hybridized to any antisense strand containing a sequence listed in Table 2 or Table 3 provided the two sequences have a region of at least 85% complementarity over a contiguous 16, 17, 18, 19, 20, or 21 nucleotide sequence. In some embodiments, the CoV RNAi agent has a sense strand consisting of the modified sequence of any of the modified sequences in Table 4, Table 5, Table 6, or Table 10, and an antisense strand consisting of the modified sequence of any of the modified sequences in Table 3 or Table 10. Certain representative sequence pairings are exemplified by the Duplex ID Nos. shown in Tables 7A, 7B, 8, and 9.

[0221] In some embodiments, a CoV RNAi agent comprises, consists of, or consists essentially of a duplex represented by any one of the Duplex ID Nos. presented herein. In some embodiments, a CoV RNAi agent consists of any of the Duplex ID Nos. presented herein. In some embodiments, a CoV RNAi agent comprises the sense strand and antisense strand nucleotide sequences of any of the Duplex ID Nos. presented herein. In some embodiments, a CoV RNAi agent comprises the sense strand and antisense strand nucleotide sequences of any of the Duplex ID Nos. presented herein and a targeting group, linking group, and/or other non-nucleotide group wherein the targeting group, linking group, and/or other non-nucleotide group is covalently linked (i.e., conjugated) to the sense strand or the antisense strand. In some embodiments, a CoV RNAi agent includes the sense strand and antisense strand modified nucleotide sequences of any of the Duplex ID Nos. presented herein. In some embodiments, a CoV RNAi agent comprises the sense strand and antisense strand modified nucleotide sequences of any of the Duplex ID Nos. presented herein and a targeting group, linking group, and/or other non-nucleotide group, wherein the targeting group, linking group, and/or other non-nucleotide group is covalently linked to the sense strand or the antisense strand.

[0222] In some embodiments, a CoV RNAi agent comprises an antisense strand and a sense strand having the nucleotide sequences of any of the antisense strand/sense strand duplexes of Tables 2, 7A, 7B, 8, 9, or 10, and comprises a targeting group. In some embodiments, a CoV RNAi agent comprises an antisense strand and a sense strand having the nucleotide sequences of any of the antisense strand/sense strand duplexes of Tables 2, 7A, 7B, 8, 9, or 10, and comprises one or more αvβ6 integrin targeting ligands.

[0223] In some embodiments, a CoV RNAi agent comprises an antisense strand and a sense strand having the nucleotide sequences of any of the antisense strand/sense strand duplexes of Tables 2, 7A, 7B, 8, 9, or 10, and comprises a targeting group that is an integrin targeting ligand. In some embodiments, a CoV RNAi agent comprises an antisense strand and a sense strand having the nucleotide sequences of any of the antisense strand/sense strand duplexes of Tables 2, 7A, 7B, 8, 9, or 10, and comprises one or more αvβ6 integrin targeting ligands or clusters of αvβ6 integrin targeting ligands (e.g., a tridentate αvβ6 integrin targeting ligand).

[0224] In some embodiments, a CoV RNAi agent comprises an antisense strand and a sense strand having the modified nucleotide sequences of any of the antisense strand/sense strand duplexes of Tables 7A, 7B, 8, 9, and 10.

[0225] In some embodiments, a CoV RNAi agent comprises an antisense strand and a sense strand having the modified nucleotide sequences of any of the antisense strand/sense strand duplexes of Tables 7A, 7B, 8, 9, and 10, and comprises an integrin targeting ligand.

[0226] In some embodiments, a CoV RNAi agent comprises, consists of, or consists essentially of any of the duplexes of Tables 7A, 7B, 8, 9, and 10.

TABLE 7A
CoV RNAi agent Duplexes with Corresponding Sense and Antisense Strand
ID Numbers and Sequence ID numbers for the modified and unmodified
nucleotide sequences. (Shown without Linking Agents or Conjugates)

| | AS modified | AS unmodified | | SS modified | SS unmodified |
|---|---|---|---|---|---|
| AS ID | SEQ ID NO: | SEQ ID NO: | SS ID | SEQ ID NO: | SEQ ID NO: |
| AM11997-AS | 676 | 1060 | AM11996-SS-NL | 794 | 1135 |
| AM11999-AS | 677 | 1061 | AM11998-SS-NL | 795 | 1136 |
| AM12001-AS | 678 | 1062 | AM12000-SS-NL | 796 | 1137 |
| AM12003-AS | 679 | 1063 | AM12002-SS-NL | 797 | 1138 |
| AM12005-AS | 680 | 1064 | AM12004-SS-NL | 798 | 1139 |
| AM12007-AS | 681 | 1065 | AM12006-SS-NL | 799 | 1140 |
| AM12009-AS | 682 | 1066 | AM12008-SS-NL | 800 | 1141 |
| AM12011-AS | 683 | 1067 | AM12010-SS-NL | 801 | 1142 |
| AM12013-AS | 684 | 1068 | AM12012-SS-NL | 802 | 1143 |
| AM12015-AS | 685 | 1069 | AM12014-SS-NL | 803 | 1144 |
| AM12017-AS | 686 | 1070 | AM12016-SS-NL | 804 | 1145 |
| AM12019-AS | 687 | 1071 | AM12018-SS-NL | 805 | 1146 |
| AM12021-AS | 688 | 1072 | AM12020-SS-NL | 806 | 1147 |
| AM12023-AS | 689 | 1073 | AM12022-SS-NL | 807 | 1148 |
| AM12025-AS | 690 | 1074 | AM12024-SS-NL | 808 | 1149 |
| AM12027-AS | 691 | 1075 | AM12026-SS-NL | 809 | 1150 |
| AM12029-AS | 692 | 1076 | AM12028-SS-NL | 810 | 1151 |
| AM12031-AS | 693 | 1077 | AM12030-SS-NL | 811 | 1152 |
| AM12033-AS | 694 | 1078 | AM12032-SS-NL | 812 | 1153 |
| AM12035-AS | 695 | 1079 | AM12034-SS-NL | 813 | 1154 |
| AM12037-AS | 696 | 1080 | AM12036-SS-NL | 814 | 1155 |
| AM12039-AS | 697 | 1081 | AM12038-SS-NL | 815 | 1156 |
| AM12041-AS | 698 | 1082 | AM12040-SS-NL | 816 | 1157 |
| AM12041-AS | 698 | 1082 | AM12042-SS-NL | 817 | 1158 |
| AM12044-AS | 699 | 1083 | AM12043-SS-NL | 818 | 1159 |
| AM12046-AS | 700 | 1084 | AM12045-SS-NL | 819 | 1160 |
| AM12048-AS | 701 | 1085 | AM12047-SS-NL | 820 | 1161 |
| AM12050-AS | 702 | 1086 | AM12049-SS-NL | 821 | 1162 |
| AM12052-AS | 703 | 1087 | AM12051-SS-NL | 822 | 1163 |
| AM12054-AS | 704 | 1088 | AM12053-SS-NL | 823 | 1164 |
| AM12054-AS | 704 | 1088 | AM12055-SS-NL | 824 | 1164 |
| AM12057-AS | 705 | 1089 | AM12056-SS-NL | 825 | 1165 |
| AM12059-AS | 706 | 1090 | AM12058-SS-NL | 826 | 1166 |
| AM12059-AS | 706 | 1090 | AM12060-SS-NL | 827 | 1166 |
| AM12062-AS | 707 | 1091 | AM12061-SS-NL | 828 | 1167 |
| AM12064-AS | 708 | 1092 | AM12063-SS-NL | 829 | 1168 |
| AM12066-AS | 709 | 1093 | AM12065-SS-NL | 830 | 1169 |
| AM12068-AS | 710 | 1094 | AM12067-SS-NL | 831 | 1170 |
| AM12070-AS | 711 | 1095 | AM12069-SS-NL | 832 | 1171 |
| AM12469-AS | 712 | 1096 | AM12468-SS-NL | 833 | 1172 |
| AM12471-AS | 713 | 1097 | AM12470-SS-NL | 834 | 1173 |
| AM12473-AS | 714 | 1098 | AM12472-SS-NL | 835 | 1174 |
| AM12475-AS | 715 | 1099 | AM12474-SS-NL | 836 | 1175 |
| AM12477-AS | 716 | 1100 | AM12476-SS-NL | 837 | 1176 |
| AM12479-AS | 717 | 1101 | AM12478-SS-NL | 838 | 1177 |
| AM12481-AS | 718 | 1102 | AM12480-SS-NL | 839 | 1178 |
| AM12483-AS | 719 | 1103 | AM12482-SS-NL | 840 | 1179 |
| AM12485-AS | 720 | 1104 | AM12484-SS-NL | 841 | 1180 |
| AM12563-AS | 721 | 1105 | AM12562-SS-NL | 842 | 1181 |
| AM12565-AS | 722 | 1106 | AM12564-SS-NL | 843 | 1182 |
| AM12567-AS | 723 | 1107 | AM12566-SS-NL | 844 | 1183 |
| AM12569-AS | 724 | 1108 | AM12568-SS-NL | 845 | 1184 |
| AM12571-AS | 725 | 1109 | AM12570-SS-NL | 846 | 1185 |
| AM12573-AS | 726 | 1110 | AM12572-SS-NL | 847 | 1186 |
| AM12575-AS | 727 | 1111 | AM12574-SS-NL | 848 | 1187 |
| AM12577-AS | 728 | 1112 | AM12576-SS-NL | 849 | 1188 |
| AM12579-AS | 729 | 1113 | AM12578-SS-NL | 850 | 1189 |
| AM12581-AS | 730 | 1114 | AM12580-SS-NL | 851 | 1190 |
| AM12583-AS | 731 | 1115 | AM12582-SS-NL | 852 | 1191 |
| AM13120-AS | 732 | 1116 | AM13119-SS-NL | 853 | 1192 |
| AM13122-AS | 733 | 1117 | AM13121-SS-NL | 854 | 1193 |
| AM13124-AS | 734 | 1118 | AM13123-SS-NL | 855 | 1194 |
| AM13126-AS | 735 | 1119 | AM13125-SS-NL | 856 | 1195 |
| AM13128-AS | 736 | 1120 | AM13127-SS-NL | 857 | 1196 |
| AM12001-AS | 678 | 1062 | AM13129-SS-NL | 858 | 1137 |
| AM12469-AS | 712 | 1096 | AM13130-SS-NL | 859 | 1172 |
| AM12471-AS | 713 | 1097 | AM13131-SS-NL | 860 | 1173 |
| AM12005-AS | 680 | 1064 | AM13132-SS-NL | 861 | 1139 |
| AM12567-AS | 723 | 1107 | AM13133-SS-NL | 862 | 1183 |
| AM12569-AS | 724 | 1108 | AM13134-SS-NL | 863 | 1184 |
| AM12575-AS | 727 | 1111 | AM13135-SS-NL | 864 | 1187 |
| AM12579-AS | 729 | 1113 | AM13136-SS-NL | 865 | 1189 |
| AM12009-AS | 682 | 1066 | AM13158-SS-NL | 866 | 1141 |
| AM13160-AS | 737 | 1121 | AM13159-SS-NL | 867 | 1197 |
| AM12017-AS | 686 | 1070 | AM13161-SS-NL | 868 | 1145 |
| AM12475-AS | 715 | 1099 | AM13162-SS-NL | 869 | 1175 |
| AM13543-AS | 738 | 1122 | AM13542-SS-NL | 870 | 1198 |
| AM13545-AS | 739 | 1123 | AM13544-SS-NL | 871 | 1199 |
| AM13547-AS | 740 | 1115 | AM13546-SS-NL | 872 | 1191 |
| AM13120-AS | 732 | 1116 | AM14660-SS-NL | 873 | 1192 |
| AM14662-AS | 741 | 1124 | AM14661-SS-NL | 874 | 1200 |
| AM13122-AS | 733 | 1117 | AM14663-SS-NL | 875 | 1193 |
| AM13128-AS | 736 | 1120 | AM14664-SS-NL | 876 | 1196 |
| AM12001-AS | 678 | 1062 | AM14665-SS-NL | 877 | 1137 |
| AM14666-AS | 742 | 1120 | AM13127-SS-NL | 857 | 1196 |
| AM14667-AS | 743 | 1062 | AM13129-SS-NL | 858 | 1137 |
| AM14686-AS | 744 | 1117 | AM13121-SS-NL | 854 | 1193 |
| AM14687-AS | 745 | 1108 | AM13134-SS-NL | 863 | 1184 |
| AM14688-AS | 746 | 1113 | AM13136-SS-NL | 865 | 1189 |
| AM14689-AS | 747 | 1111 | AM13135-SS-NL | 864 | 1187 |
| AM14690-AS | 748 | 1099 | AM13162-SS-NL | 869 | 1175 |
| AM14859-AS | 749 | 1107 | AM13133-SS-NL | 862 | 1183 |
| AM14861-AS | 750 | 1125 | AM14860-SS-NL | 879 | 1201 |
| AM12475-AS | 715 | 1099 | AM15013-SS-NL | 880 | 1175 |
| AM12569-AS | 724 | 1108 | AM15014-SS-NL | 881 | 1184 |
| AM12579-AS | 729 | 1113 | AM15015-SS-NL | 882 | 1189 |
| AM12575-AS | 727 | 1111 | AM15016-SS-NL | 883 | 1187 |
| AM12567-AS | 723 | 1107 | AM15017-SS-NL | 884 | 1183 |
| AM14667-AS | 743 | 1062 | AM14665-SS-NL | 877 | 1137 |
| AM15563-AS | 751 | 1062 | AM14665-SS-NL | 877 | 1137 |
| AM15563-AS | 751 | 1062 | AM15564-SS-NL | 885 | 1137 |
| AM15565-AS | 752 | 1062 | AM15564-SS-NL | 885 | 1137 |
| AM15566-AS | 753 | 1062 | AM15564-SS-NL | 885 | 1137 |
| AM15568-AS | 754 | 1126 | AM15567-SS-NL | 886 | 1202 |
| AM15569-AS | 755 | 1062 | AM15564-SS-NL | 885 | 1137 |
| AM14690-AS | 748 | 1099 | AM15013-SS-NL | 880 | 1175 |
| AM15570-AS | 756 | 1099 | AM15013-SS-NL | 880 | 1175 |
| AM15570-AS | 756 | 1099 | AM15571-SS-NL | 887 | 1175 |
| AM15572-AS | 757 | 1099 | AM15571-SS-NL | 887 | 1175 |
| AM15574-AS | 758 | 1127 | AM15573-SS-NL | 888 | 1203 |
| AM15575-AS | 759 | 1099 | AM15571-SS-NL | 887 | 1175 |
| AM14859-AS | 749 | 1107 | AM15017-SS-NL | 884 | 1183 |
| AM15576-AS | 760 | 1107 | AM15017-SS-NL | 884 | 1183 |
| AM15576-AS | 760 | 1107 | AM15577-SS-NL | 889 | 1183 |
| AM15578-AS | 761 | 1107 | AM15577-SS-NL | 889 | 1183 |
| AM15579-AS | 762 | 1107 | AM15577-SS-NL | 889 | 1183 |
| AM15580-AS | 763 | 1107 | AM15577-SS-NL | 889 | 1183 |
| AM15582-AS | 764 | 1125 | AM15581-SS-NL | 890 | 1201 |
| AM14688-AS | 746 | 1113 | AM15015-SS-NL | 882 | 1189 |
| AM15795-AS | 765 | 1113 | AM15015-SS-NL | 882 | 1189 |
| AM15795-AS | 765 | 1113 | AM15796-SS-NL | 891 | 1189 |
| AM15797-AS | 766 | 1113 | AM15796-SS-NL | 891 | 1189 |
| AM15798-AS | 767 | 1113 | AM15796-SS-NL | 891 | 1189 |
| AM15799-AS | 768 | 1113 | AM15796-SS-NL | 891 | 1189 |
| AM15801-AS | 769 | 1128 | AM15800-SS-NL | 892 | 1204 |
| AM12015-AS | 685 | 1069 | AM15802-SS-NL | 893 | 1144 |
| AM15803-AS | 770 | 1069 | AM15802-SS-NL | 893 | 1144 |
| AM15804-AS | 771 | 1069 | AM15802-SS-NL | 893 | 1144 |
| AM15804-AS | 771 | 1069 | AM15805-SS-NL | 894 | 1144 |
| AM15807-AS | 772 | 1129 | AM15806-SS-NL | 895 | 1205 |
| AM15808-AS | 773 | 1069 | AM15805-SS-NL | 894 | 1144 |
| AM12017-AS | 686 | 1070 | AM15809-SS-NL | 896 | 1145 |
| AM15810-AS | 774 | 1070 | AM15809-SS-NL | 896 | 1145 |
| AM15812-AS | 775 | 1070 | AM15811-SS-NL | 897 | 1145 |
| AM14666-AS | 742 | 1120 | AM14664-SS-NL | 876 | 1196 |
| AM15813-AS | 776 | 1120 | AM14664-SS-NL | 876 | 1196 |
| AM15813-AS | 776 | 1120 | AM15814-SS-NL | 898 | 1196 |
| AM15815-AS | 777 | 1120 | AM15814-SS-NL | 898 | 1196 |
| AM15816-AS | 778 | 1120 | AM15814-SS-NL | 898 | 1196 |
| AM15818-AS | 779 | 1122 | AM15817-SS-NL | 899 | 1198 |
| AM15820-AS | 780 | 1130 | AM15819-SS-NL | 900 | 1206 |
| AM15822-AS | 781 | 1131 | AM15821-SS-NL | 901 | 1207 |
| AM15824-AS | 782 | 1132 | AM15823-SS-NL | 902 | 1208 |
| AM15826-AS | 783 | 1119 | AM15825-SS-NL | 903 | 1195 |
| AM15828-AS | 784 | 1064 | AM15827-SS-NL | 904 | 1139 |
| AM15830-AS | 785 | 1133 | AM15829-SS-NL | 905 | 1209 |
| AM15832-AS | 786 | 1084 | AM15831-SS-NL | 906 | 1160 |
| AM16516-AS | 787 | 1062 | AM15564-SS-NL | 885 | 1137 |
| AM16517-AS | 788 | 1126 | AM15567-SS-NL | 886 | 1202 |
| AM16519-AS | 789 | 1134 | AM16518-SS-NL | 907 | 1210 |
| AM15807-AS | 772 | 1129 | AM16520-SS-NL | 908 | 1205 |
| AM16521-AS | 790 | 1069 | AM15802-SS-NL | 893 | 1144 |
| AM16522-AS | 791 | 1069 | AM15802-SS-NL | 893 | 1144 |
| AM16523-AS | 792 | 1129 | AM16520-SS-NL | 908 | 1205 |
| AM16517-AS | 788 | 1126 | AM16965-SS-NL | 909 | 1202 |
| AM16966-AS | 793 | 1126 | AM16965-SS-NL | 909 | 1202 |
| AM15798-AS | 767 | 1113 | AM16967-SS-NL | 910 | 1189 |
| AM15813-AS | 776 | 1120 | AM13127-SS-NL | 857 | 1196 |
| AM15818-AS | 779 | 1122 | AM16968-SS-NL | 911 | 1198 |
| AM15570-AS | 756 | 1099 | AM16969-SS-NL | 912 | 1175 |
| AM15807-AS | 772 | 1129 | AM16970-SS-NL | 913 | 1205 |
| AM16966-AS | 793 | 1126 | AM15567-SS-NL | 886 | 1202 |

TABLE 7B
CoV RNAi agent Duplexes with Corresponding Sense and Antisense Strand ID Numbers
and Sequence ID numbers for the modified and unmodified nucleotide sequences.

| | | AS | AS | | SS | SS |
|---|---|---|---|---|---|---|
| | | modified | unmodified | | modified | unmodified |
| Duplex | AS ID | SEQ ID NO: | SEQ ID NO: | SS ID | SEQ ID NO: | SEQ ID NO: |
| AD08582 | AM11997-AS | 676 | 1060 | AM11996-SS | 914 | 1135 |
| AD08583 | AM11999-AS | 677 | 1061 | AM11998-SS | 915 | 1136 |
| AD08584 | AM12001-AS | 678 | 1062 | AM12000-SS | 916 | 1137 |
| AD08585 | AM12003-AS | 679 | 1063 | AM12002-SS | 917 | 1138 |
| AD08586 | AM12005-AS | 680 | 1064 | AM12004-SS | 918 | 1139 |
| AD08587 | AM12007-AS | 681 | 1065 | AM12006-SS | 919 | 1140 |
| AD08588 | AM12009-AS | 682 | 1066 | AM12008-SS | 920 | 1141 |
| AD08589 | AM12011-AS | 683 | 1067 | AM12010-SS | 921 | 1142 |
| AD08590 | AM12013-AS | 684 | 1068 | AM12012-SS | 922 | 1143 |
| AD08591 | AM12015-AS | 685 | 1069 | AM12014-SS | 923 | 1144 |
| AD08592 | AM12017-AS | 686 | 1070 | AM12016-SS | 924 | 1145 |
| AD08593 | AM12019-AS | 687 | 1071 | AM12018-SS | 925 | 1146 |
| AD08594 | AM12021-AS | 688 | 1072 | AM12020-SS | 926 | 1147 |
| AD08595 | AM12023-AS | 689 | 1073 | AM12022-SS | 927 | 1148 |
| AD08596 | AM12025-AS | 690 | 1074 | AM12024-SS | 928 | 1149 |
| AD08597 | AM12027-AS | 691 | 1075 | AM12026-SS | 929 | 1150 |
| AD08598 | AM12029-AS | 692 | 1076 | AM12028-SS | 930 | 1151 |
| AD08599 | AM12031-AS | 693 | 1077 | AM12030-SS | 931 | 1152 |
| AD08600 | AM12033-AS | 694 | 1078 | AM12032-SS | 932 | 1153 |
| AD08601 | AM12035-AS | 695 | 1079 | AM12034-SS | 933 | 1154 |
| AD08602 | AM12037-AS | 696 | 1080 | AM12036-SS | 934 | 1155 |
| AD08603 | AM12039-AS | 697 | 1081 | AM12038-SS | 935 | 1156 |
| AD08604 | AM12041-AS | 698 | 1082 | AM12040-SS | 936 | 1157 |
| AD08605 | AM12041-AS | 698 | 1082 | AM12042-SS | 937 | 1158 |
| AD08606 | AM12044-AS | 699 | 1083 | AM12043-SS | 938 | 1159 |
| AD08607 | AM12046-AS | 700 | 1084 | AM12045-SS | 939 | 1160 |
| AD08608 | AM12048-AS | 701 | 1085 | AM12047-SS | 940 | 1161 |
| AD08609 | AM12050-AS | 702 | 1086 | AM12049-SS | 941 | 1162 |
| AD08610 | AM12052-AS | 703 | 1087 | AM12051-SS | 942 | 1163 |
| AD08611 | AM12054-AS | 704 | 1088 | AM12053-SS | 943 | 1164 |
| AD08612 | AM12054-AS | 704 | 1088 | AM12055-SS | 944 | 1164 |
| AD08613 | AM12057-AS | 705 | 1089 | AM12056-SS | 945 | 1165 |
| AD08614 | AM12059-AS | 706 | 1090 | AM12058-SS | 946 | 1166 |
| AD08615 | AM12059-AS | 706 | 1090 | AM12060-SS | 947 | 1166 |
| AD08616 | AM12062-AS | 707 | 1091 | AM12061-SS | 948 | 1167 |
| AD08617 | AM12064-AS | 708 | 1092 | AM12063-SS | 949 | 1168 |
| AD08618 | AM12066-AS | 709 | 1093 | AM12065-SS | 950 | 1169 |
| AD08619 | AM12068-AS | 710 | 1094 | AM12067-SS | 951 | 1170 |
| AD08620 | AM12070-AS | 711 | 1095 | AM12069-SS | 952 | 1171 |
| AD08857 | AM12469-AS | 712 | 1096 | AM12468-SS | 953 | 1172 |
| AD08858 | AM12471-AS | 713 | 1097 | AM12470-SS | 954 | 1173 |
| AD08859 | AM12473-AS | 714 | 1098 | AM12472-SS | 955 | 1174 |
| AD08860 | AM12475-AS | 715 | 1099 | AM12474-SS | 956 | 1175 |
| AD08861 | AM12477-AS | 716 | 1100 | AM12476-SS | 957 | 1176 |
| AD08862 | AM12479-AS | 717 | 1101 | AM12478-SS | 958 | 1177 |
| AD08863 | AM12481-AS | 718 | 1102 | AM12480-SS | 959 | 1178 |
| AD08864 | AM12483-AS | 719 | 1103 | AM12482-SS | 960 | 1179 |
| AD08865 | AM12485-AS | 720 | 1104 | AM12484-SS | 961 | 1180 |
| AD08927 | AM12563-AS | 721 | 1105 | AM12562-SS | 962 | 1181 |
| AD08928 | AM12565-AS | 722 | 1106 | AM12564-SS | 963 | 1182 |
| AD08929 | AM12567-AS | 723 | 1107 | AM12566-SS | 964 | 1183 |
| AD08930 | AM12569-AS | 724 | 1108 | AM12568-SS | 965 | 1184 |
| AD08931 | AM12571-AS | 725 | 1109 | AM12570-SS | 966 | 1185 |
| AD08932 | AM12573-AS | 726 | 1110 | AM12572-SS | 967 | 1186 |
| AD08933 | AM12575-AS | 727 | 1111 | AM12574-SS | 968 | 1187 |
| AD08934 | AM12577-AS | 728 | 1112 | AM12576-SS | 969 | 1188 |
| AD08935 | AM12579-AS | 729 | 1113 | AM12578-SS | 970 | 1189 |
| AD08936 | AM12581-AS | 730 | 1114 | AM12580-SS | 971 | 1190 |
| AD08937 | AM12583-AS | 731 | 1115 | AM12582-SS | 972 | 1191 |
| AD09274 | AM13120-AS | 732 | 1116 | AM13119-SS | 973 | 1192 |
| AD09275 | AM13122-AS | 733 | 1117 | AM13121-SS | 974 | 1193 |
| AD09276 | AM13124-AS | 734 | 1118 | AM13123-SS | 975 | 1194 |
| AD09277 | AM13126-AS | 735 | 1119 | AM13125-SS | 976 | 1195 |
| AD09278 | AM13128-AS | 736 | 1120 | AM13127-SS | 977 | 1196 |
| AD09279 | AM12001-AS | 678 | 1062 | AM13129-SS | 978 | 1137 |
| AD09280 | AM12469-AS | 712 | 1096 | AM13130-SS | 979 | 1172 |
| AD09281 | AM12471-AS | 713 | 1097 | AM13131-SS | 980 | 1173 |
| AD09282 | AM12005-AS | 680 | 1064 | AM13132-SS | 981 | 1139 |
| AD09283 | AM12567-AS | 723 | 1107 | AM13133-SS | 982 | 1183 |
| AD09284 | AM12569-AS | 724 | 1108 | AM13134-SS | 983 | 1184 |
| AD09285 | AM12575-AS | 727 | 1111 | AM13135-SS | 984 | 1187 |
| AD09286 | AM12579-AS | 729 | 1113 | AM13136-SS | 985 | 1189 |
| AD09298 | AM12009-AS | 682 | 1066 | AM13158-SS | 986 | 1141 |
| AD09299 | AM13160-AS | 737 | 1121 | AM13159-SS | 987 | 1197 |
| AD09300 | AM12017-AS | 686 | 1070 | AM13161-SS | 988 | 1145 |
| AD09301 | AM12475-AS | 715 | 1099 | AM13162-SS | 989 | 1175 |
| AD09530 | AM13543-AS | 738 | 1122 | AM13542-SS | 990 | 1198 |
| AD09531 | AM13545-AS | 739 | 1123 | AM13544-SS | 991 | 1199 |
| AD09532 | AM13547-AS | 740 | 1115 | AM13546-SS | 992 | 1191 |
| AD10293 | AM13120-AS | 732 | 1116 | AM14660-SS | 993 | 1192 |
| AD10294 | AM14662-AS | 741 | 1124 | AM14661-SS | 994 | 1200 |
| AD10295 | AM13122-AS | 733 | 1117 | AM14663-SS | 995 | 1193 |
| AD10296 | AM13128-AS | 736 | 1120 | AM14664-SS | 996 | 1196 |
| AD10297 | AM12001-AS | 678 | 1062 | AM14665-SS | 997 | 1137 |
| AD10298 | AM14666-AS | 742 | 1120 | AM13127-SS | 977 | 1196 |
| AD10299 | AM14667-AS | 743 | 1062 | AM13129-SS | 978 | 1137 |
| AD10319 | AM14686-AS | 744 | 1117 | AM13121-SS | 974 | 1193 |
| AD10320 | AM14687-AS | 745 | 1108 | AM13134-SS | 983 | 1184 |
| AD10321 | AM14688-AS | 746 | 1113 | AM13136-SS | 985 | 1189 |
| AD10322 | AM14689-AS | 747 | 1111 | AM13135-SS | 984 | 1187 |
| AD10323 | AM14690-AS | 748 | 1099 | AM13162-SS | 989 | 1175 |
| AD10424 | AM14859-AS | 749 | 1107 | AM13133-SS | 982 | 1183 |
| AD10425 | AM14861-AS | 750 | 1125 | AM14860-SS | 999 | 1201 |
| AD10536 | AM12475-AS | 715 | 1099 | AM15013-SS | 1000 | 1175 |
| AD10537 | AM12569-AS | 724 | 1108 | AM15014-SS | 1001 | 1184 |
| AD10538 | AM12579-AS | 729 | 1113 | AM15015-SS | 1002 | 1189 |
| AD10539 | AM12575-AS | 727 | 1111 | AM15016-SS | 1003 | 1187 |
| AD10540 | AM12567-AS | 723 | 1107 | AM15017-SS | 1004 | 1183 |
| AD10912 | AM14667-AS | 743 | 1062 | AM14665-SS | 997 | 1137 |
| AD10913 | AM15563-AS | 751 | 1062 | AM14665-SS | 997 | 1137 |
| AD10914 | AM15563-AS | 751 | 1062 | AM15564-SS | 1005 | 1137 |
| AD10915 | AM15565-AS | 752 | 1062 | AM15564-SS | 1005 | 1137 |
| AD10916 | AM15566-AS | 753 | 1062 | AM15564-SS | 1005 | 1137 |
| AD10917 | AM15568-AS | 754 | 1126 | AM15567-SS | 1006 | 1202 |
| AD10918 | AM15569-AS | 755 | 1062 | AM15564-SS | 1005 | 1137 |
| AD10919 | AM14690-AS | 748 | 1099 | AM15013-SS | 1000 | 1175 |
| AD10920 | AM15570-AS | 756 | 1099 | AM15013-SS | 1000 | 1175 |
| AD10921 | AM15570-AS | 756 | 1099 | AM15571-SS | 1007 | 1175 |
| AD10922 | AM15572-AS | 757 | 1099 | AM15571-SS | 1007 | 1175 |
| AD10923 | AM15574-AS | 758 | 1127 | AM15573-SS | 1008 | 1203 |
| AD10924 | AM15575-AS | 759 | 1099 | AM15571-SS | 1007 | 1175 |
| AD10925 | AM14859-AS | 749 | 1107 | AM15017-SS | 1004 | 1183 |
| AD10926 | AM15576-AS | 760 | 1107 | AM15017-SS | 1004 | 1183 |
| AD10927 | AM15576-AS | 760 | 1107 | AM15577-SS | 1009 | 1183 |
| AD10928 | AM15578-AS | 761 | 1107 | AM15577-SS | 1009 | 1183 |
| AD10929 | AM15579-AS | 762 | 1107 | AM15577-SS | 1009 | 1183 |
| AD10930 | AM15580-AS | 763 | 1107 | AM15577-SS | 1009 | 1183 |
| AD10931 | AM15582-AS | 764 | 1125 | AM15581-SS | 1010 | 1201 |
| AD11101 | AM14688-AS | 746 | 1113 | AM15015-SS | 1002 | 1189 |
| AD11102 | AM15795-AS | 765 | 1113 | AM15015-SS | 1002 | 1189 |
| AD11103 | AM15795-AS | 765 | 1113 | AM15796-SS | 1011 | 1189 |
| AD11104 | AM15797-AS | 766 | 1113 | AM15796-SS | 1011 | 1189 |
| AD11105 | AM15798-AS | 767 | 1113 | AM15796-SS | 1011 | 1189 |
| AD11106 | AM15799-AS | 768 | 1113 | AM15796-SS | 1011 | 1189 |
| AD11107 | AM15801-AS | 769 | 1128 | AM15800-SS | 1012 | 1204 |
| AD11108 | AM12015-AS | 685 | 1069 | AM15802-SS | 1013 | 1144 |
| AD11109 | AM15803-AS | 770 | 1069 | AM15802-SS | 1013 | 1144 |
| AD11110 | AM15804-AS | 771 | 1069 | AM15802-SS | 1013 | 1144 |
| AD11111 | AM15804-AS | 771 | 1069 | AM15805-SS | 1014 | 1144 |
| AD11112 | AM15807-AS | 772 | 1129 | AM15806-SS | 1015 | 1205 |
| AD11113 | AM15808-AS | 773 | 1069 | AM15805-SS | 1014 | 1144 |
| AD11114 | AM12017-AS | 686 | 1070 | AM15809-SS | 1016 | 1145 |
| AD11115 | AM15810-AS | 774 | 1070 | AM15809-SS | 1016 | 1145 |
| AD11116 | AM15812-AS | 775 | 1070 | AM15811-SS | 1017 | 1145 |
| AD11117 | AM14666-AS | 742 | 1120 | AM14664-SS | 996 | 1196 |
| AD11118 | AM15813-AS | 776 | 1120 | AM14664-SS | 996 | 1196 |
| AD11119 | AM15813-AS | 776 | 1120 | AM15814-SS | 1018 | 1196 |
| AD11120 | AM15815-AS | 777 | 1120 | AM15814-SS | 1018 | 1196 |
| AD11121 | AM15816-AS | 778 | 1120 | AM15814-SS | 1018 | 1196 |
| AD11122 | AM15818-AS | 779 | 1122 | AM15817-SS | 1019 | 1198 |
| AD11123 | AM15820-AS | 780 | 1130 | AM15819-SS | 1020 | 1206 |
| AD11124 | AM15822-AS | 781 | 1131 | AM15821-SS | 1021 | 1207 |
| AD11125 | AM15824-AS | 782 | 1132 | AM15823-SS | 1022 | 1208 |
| AD11126 | AM15826-AS | 783 | 1119 | AM15825-SS | 1023 | 1195 |
| AD11127 | AM15828-AS | 784 | 1064 | AM15827-SS | 1024 | 1139 |
| AD11128 | AM15830-AS | 785 | 1133 | AM15829-SS | 1025 | 1209 |
| AD11129 | AM15832-AS | 786 | 1084 | AM15831-SS | 1026 | 1160 |
| AD11610 | AM16516-AS | 787 | 1062 | AM15564-SS | 1005 | 1137 |
| AD11611 | AM16517-AS | 788 | 1126 | AM15567-SS | 1006 | 1202 |
| AD11612 | AM16519-AS | 789 | 1134 | AM16518-SS | 1027 | 1210 |
| AD11613 | AM15807-AS | 772 | 1129 | AM16520-SS | 1028 | 1205 |
| AD11614 | AM16521-AS | 790 | 1069 | AM15802-SS | 1013 | 1144 |
| AD11615 | AM16522-AS | 791 | 1069 | AM15802-SS | 1013 | 1144 |
| AD11616 | AM16523-AS | 792 | 1129 | AM16520-SS | 1028 | 1205 |
| AD11958 | AM16517-AS | 788 | 1126 | AM16965-SS | 1029 | 1202 |
| AD11959 | AM16966-AS | 793 | 1126 | AM16965-SS | 1029 | 1202 |
| AD11960 | AM15798-AS | 767 | 1113 | AM16967-SS | 1030 | 1189 |
| AD11961 | AM15813-AS | 776 | 1120 | AM13127-SS | 977 | 1196 |
| AD11962 | AM15818-AS | 779 | 1122 | AM16968-SS | 1031 | 1198 |
| AD11963 | AM15570-AS | 756 | 1099 | AM16969-SS | 1032 | 1175 |
| AD11964 | AM15807-AS | 772 | 1129 | AM16970-SS | 1033 | 1205 |
| AD12040 | AM16966-AS | 793 | 1126 | AM15567-SS | 1006 | 1202 |

TABLE 8
CoV RNAi agent Duplexes with Corresponding Sense and Antisense Strand
ID Numbers and Sequence ID numbers for the modified and unmodified
nucleotide sequences. (Shown with Targeting Ligand Conjugates)

| | | AS | AS | | SS | SS |
|---|---|---|---|---|---|---|
| | | modified | unmodified | | modified | unmodified |
| Duplex | AS ID | SEQ ID NO: | SEQ ID NO: | SS ID | SEQ ID NO: | SEQ ID NO: |
| AC001334 | AM13120-AS | 732 | 1116 | CS001679 | 1034 | 1192 |
| AC001335 | AM13122-AS | 733 | 1117 | CS001681 | 1035 | 1193 |
| AC001336 | AM13124-AS | 734 | 1118 | CS001683 | 1036 | 1194 |
| AC001337 | AM13126-AS | 735 | 1119 | CS001685 | 1037 | 1195 |
| AC001338 | AM13128-AS | 736 | 1120 | CS001687 | 1038 | 1196 |
| AC001339 | AM12001-AS | 678 | 1062 | CS001689 | 1039 | 1137 |
| AC001340 | AM12469-AS | 712 | 1096 | CS001691 | 1040 | 1172 |
| AC001341 | AM12471-AS | 713 | 1096 | CS001693 | 1041 | 1173 |
| AC001342 | AM12005-AS | 680 | 1064 | CS001695 | 1042 | 1139 |
| AC001343 | AM12567-AS | 723 | 1107 | CS001697 | 1043 | 1183 |
| AC001344 | AM12569-AS | 724 | 1108 | CS001699 | 1044 | 1184 |
| AC001345 | AM12575-AS | 727 | 1111 | CS001701 | 1045 | 1187 |
| AC001346 | AM12579-AS | 729 | 1113 | CS001703 | 1046 | 1189 |
| AC001347 | AM12009-AS | 682 | 1066 | CS001705 | 1047 | 1141 |
| AC001348 | AM13160-AS | 737 | 1121 | CS001707 | 1048 | 1197 |
| AC001349 | AM12017-AS | 686 | 1070 | CS001709 | 1049 | 1145 |
| AC001350 | AM12475-AS | 715 | 1099 | CS001711 | 1050 | 1175 |
| AC001474 | AM13543-AS | 738 | 1122 | CS001891 | 1051 | 1198 |
| AC001475 | AM13545-AS | 739 | 1123 | CS001893 | 1052 | 1199 |
| AC001476 | AM13547-AS | 740 | 1115 | CS001895 | 1053 | 1191 |
| AC001887 | AM14666-AS | 742 | 1120 | CS001687 | 1038 | 1196 |
| AC001888 | AM14667-AS | 743 | 1062 | CS001689 | 1039 | 1137 |
| AC001922 | AM14686-AS | 744 | 1117 | CS001681 | 1035 | 1193 |
| AC001923 | AM14687-AS | 745 | 1108 | CS001699 | 1044 | 1184 |
| AC001924 | AM14688-AS | 746 | 1113 | CS001703 | 1046 | 1189 |
| AC001925 | AM14689-AS | 747 | 1111 | CS001701 | 1045 | 1187 |
| AC001926 | AM14690-AS | 748 | 1099 | CS001711 | 1050 | 1175 |
| AC001961 | AM14859-AS | 749 | 1107 | CS001697 | 1043 | 1183 |
| AC001962 | AM14861-AS | 750 | 1125 | CS002495 | 1054 | 1201 |
| AC002617 | AM16517-AS | 788 | 1126 | CS003334 | 1055 | 1202 |
| AC002618 | AM16966-AS | 793 | 1126 | CS003334 | 1055 | 1202 |
| AC002619 | AM15798-AS | 767 | 1113 | CS003337 | 1056 | 1189 |
| AC002620 | AM15813-AS | 776 | 1120 | CS001687 | 1038 | 1196 |
| AC002621 | AM15818-AS | 779 | 1122 | CS003340 | 1057 | 1198 |
| AC002622 | AM15570-AS | 756 | 1099 | CS003342 | 1058 | 1175 |
| AC002623 | AM15807-AS | 772 | 1129 | CS003344 | 1059 | 1205 |

TABLE 9
Conjugate Duplex ID Numbers Referencing Position
Targeted On SARS-Cov-2 Viral Genome

| | | | | Targeted SARS- |
|---|---|---|---|---|
| | | | | CoV-2 Viral |
| Conjugate | | | Duplex ID | Genome Position |
| Duplex ID | AS ID | SS ID | (Pre-Conjugation) | (Of SEQ ID NO: 1) |
| AC001334 | AM13120-AS | CS001679 | AD09274 | 3652 |
| AC001335 | AM13122-AS | CS001681 | AD09275 | 8140 |
| AC001336 | AM13124-AS | CS001683 | AD09276 | 4038 |
| AC001337 | AM13126-AS | CS001685 | AD09277 | 8039 |
| AC001338 | AM13128-AS | CS001687 | AD09278 | 4917 |
| AC001339 | AM12001-AS | CS001689 | AD09279 | 6412 |
| AC001340 | AM12469-AS | CS001691 | AD09280 | 10931 |
| AC001341 | AM12471-AS | CS001693 | AD09281 | 11434 |
| AC001342 | AM12005-AS | CS001695 | AD09282 | 12284 |
| AC001343 | AM12567-AS | CS001697 | AD09283 | 28587 |
| AC001344 | AM12569-AS | CS001699 | AD09284 | 28590 |
| AC001345 | AM12575-AS | CS001701 | AD09285 | 29064 |
| AC001346 | AM12579-AS | CS001703 | AD09286 | 29150 |
| AC001347 | AM12009-AS | CS001705 | AD09298 | 13766 |
| AC001348 | AM13160-AS | CS001707 | AD09299 | 14050 |
| AC001349 | AM12017-AS | CS001709 | AD09300 | 14511 |
| AC001350 | AM12475-AS | CS001711 | AD09301 | 15886 |
| AC001474 | AM13543-AS | CS001891 | AD09530 | 4156 |
| AC001475 | AM13545-AS | CS001893 | AD09531 | 4926 |
| AC001476 | AM13547-AS | CS001895 | AD09532 | 29329 |
| AC001887 | AM14666-AS | CS001687 | AD10298 | 4917 |
| AC001888 | AM14667-AS | CS001689 | AD10299 | 6412 |
| AC001922 | AM14686-AS | CS001681 | AD10319 | 8140 |
| AC001923 | AM14687-AS | CS001699 | AD10320 | 28590 |
| AC001924 | AM14688-AS | CS001703 | AD10321 | 29150 |
| AC001925 | AM14689-AS | CS001701 | AD10322 | 29064 |
| AC001926 | AM14690-AS | CS001711 | AD10323 | 15886 |
| AC001961 | AM14859-AS | CS001697 | AD10424 | 28587 |
| AC001962 | AM14861-AS | CS002495 | AD10425 | 28587 |
| AC002617 | AM16517-AS | CS003334 | AD11958 | 6412 |
| AC002618 | AM16966-AS | CS003334 | AD11959 | 6412 |
| AC002619 | AM15798-AS | CS003337 | AD11960 | 29150 |
| AC002620 | AM15813-AS | CS001687 | AD11961 | 4917 |
| AC002621 | AM15818-AS | CS003340 | AD11962 | 4156 |
| AC002622 | AM15570-AS | CS003342 | AD11963 | 15886 |
| AC002623 | AM15807-AS | CS003344 | AD11964 | 14503 |

TABLE 10
Conjugate ID Numbers With Chemically Modified Antisense
and Sense Strands (including Linkers and Conjugates)

| | Sense Strand | | | |
|---|---|---|---|---|
| AC ID | (Fully Modified with Conjugated | SEQ ID | | SEQ ID |
| Number | Targeting Ligand)(5′ → 3′) | NO: | Antisense Strand (5′ → 3′) | NO: |
| AC001334 | Tri-SM6.1-avb6-TA14- | 1034 | usCfsasUfaAfgCfaCfuCfuUfaAfgAfaGfsc | 732 |
| | gscuucuuaAfGfAfgugcuuaugas(invAb) | | | |
| AC001335 | Tri-SM6.1-avb6-TA14- | 1035 | usUfsasGfaUfaAfgAfcAfuUfgUfcUfaAfsg | 733 |
| | csuuagacaAfUfGfucuuaucuaas(invAb) | | | |
| AC001336 | Tri-SM6.1-avb6-TA14- | 1036 | usAfsusGfaAfgAfuUfgCfcAfuUfaAfuGfsc | 734 |
| | gscauuaauGfGfCfaaucuucauas(invAb) | | | |
| AC001337 | Tri-SM6.1-avb6-TA14- | 1037 | asAfsasCfgUfaUfuAfaCfgUfaAfgCfaUfsc | 735 |
| | gsaugcuuaCfGfUfuaauacguuus(invAb) | | | |
| AC001338 | Tri-SM6.1-avb6-TA14- | 1038 | usCfsusUfaAfgAfuUfgUfcAfaAfgGfuGfsc | 736 |
| | gscaccuuuGfAfCfaaucuuaagas(invAb) | | | |
| AC001339 | Tri-SM6.1-avb6-TA14- | 1039 | usUfsasGfgAfuUfuUfcCfaCfuAfcUfuCfsc | 678 |
| | gsgaaguagUfGfGfaaaauccuaas(invAb) | | | |
| AC001340 | Tri-SM6.1-avb6-TA14- | 1040 | usUfsgsUfcUfaAfcAfaCfaUfcAfaAfaGfsg | 712 |
| | cscuuuugaUfGfUfuguuagacaas(invAb) | | | |
| AC001341 | Tri-SM6.1-avb6-TA14- | 1041 | usCfsusUfgAfuCfuAfaAfgCfaUfuAfcCfsa | 713 |
| | usgguaaugCfUfUfuagaucaagas(invAb) | | | |
| AC001342 | Tri-SM6.1-avb6-TA14- | 1042 | asUfsasCfaUfuUfgGfgUfcAfuAfgCfuUfsg | 680 |
| | csaagcuauGfAfCfccaaauguaus(invAb) | | | |
| AC001343 | Tri-SM6.1-avb6-TA14- | 1043 | asGfsusAfgAfaAfuAfcCfaUfcUfuGfgAfsc | 723 |
| | gsuccaagaUfGfGfuauuucuacus(invAb) | | | |
| AC001344 | Tri-SM6.1-avb6-TA14- | 1044 | usGfsusAfgUfaGfaAfaUfaCfcAfuCfuUfsg | 724 |
| | csaagauggUfAfUfuucuacuacas(invAb) | | | |
| AC001345 | Tri-SM6.1-avb6-TA14- | 1045 | usUfsasCfaUfuGfuAfuGfcUfuUfaGfuGfsg | 727 |
| | cscacuaaaGfCfAfuacaauguaas(invAb) | | | |
| AC001346 | Tri-SM6.1-avb6-TA14- | 1046 | usUfsusGfuAfaUfcAfgUfuCfcUfuGfuCfsc | 729 |
| | gsgacaaggAfAfCfugauuacaaas(invAb) | | | |
| AC001347 | Tri-SM6.1-avb6-TA14- | 1047 | usUfsgsAfuAfuAfuGfuGfgUfaCfcAfuGfsc | 682 |
| | gscaugguaCfCfAfcauauaucaas(invAb) | | | |
| AC001348 | Tri-SM6.1-avb6-TA14- | 1048 | usUfsgsAfuUfaUfcUfaAfuGfuCfaGfuAfsc | 737 |
| | gsuacugacAfUfUfagauaaucaas(invAb) | | | |
| AC001349 | Tri-SM6.1-avb6-TA14- | 1049 | usAfsgsCfuAfuGfuAfaGfuUfuAfcAfuCfsc | 686 |
| | gsgauguaaAfCfUfuacauagcuas(invAb) | | | |
| AC001350 | Tri-SM6.1-avb6-TA14- | 1050 | usUfsgsUfuUfaAfcUfaGfcAfuUfgUfaUfsg | 715 |
| | csauacaauGfCfUfaguuaaacaas(invAb) | | | |
| AC001474 | Tri-SM6.1-avb6-TA14- | 1051 | usUfsasguagguauAfaCfcAfcagcsa | 738 |
| | usgcuguggUfuAfuAfccuacuaas(invAb) | | | |
| AC001475 | Tri-SM6.1-avb6-TA14- | 1052 | asAfsasGfaagugucUfuAfaGfauugsc | 739 |
| | gscaaucUfuAfaGfacacuucuuus(invAb) | | | |
| AC001476 | Tri-SM6.1-avb6-TA14- | 1053 | usCfsgsucaaUfAfugCfuUfaUfucagsc | 740 |
| | gscugaaUfaAfgCfauauugacias(invAb) | | | |
| AC001887 | Tri-SM6.1-avb6-TA14- | 1038 | cPrpusCfsusUfaAfgAfuUfgUfcAfaAfgGfuGfsc | 742 |
| | gscaccuuuGfAfCfaaucuuaagas(invAb) | | | |
| AC001888 | Tri-SM6.1-avb6-TA14- | 1039 | cPrpusUfsasGfgAfuUfuUfcCfaCfuAfcUfuCfsc | 743 |
| | gsgaaguagUfGfGfaaaauccuaas(invAb) | | | |
| AC001922 | Tri-SM6.1-avb6-TA14- | 1035 | cPrpusUfsasGfaUfaAfgAfcAfuUfgUfcUfaAfsg | 744 |
| | csuuagacaAfUfGfucuuaucuaas(invAb) | | | |
| AC001923 | Tri-SM6.1-avb6-TA14- | 1044 | cPrpusGfsusAfgUfaGfaAfaUfaCfcAfuCfuUfsg | 745 |
| | csaagauggUfAfUfuucuacuacas(invAb) | | | |
| AC001924 | Tri-SM6.1-avb6-TA14- | 1046 | cPrpusUfsusGfuAfaUfcAfgUfuCfcUfuGfuCfsc | 746 |
| | gsgacaaggAfAfCfugauuacaaas(invAb) | | | |
| AC001925 | Tri-SM6.1-avb6-TA14- | 1045 | cPrpusUfsasCfaUfuGfuAfuGfcUfuUfaGfuGfsg | 747 |
| | cscacuaaaGfCfAfuacaauguaas(invAb) | | | |
| AC001926 | Tri-SM6.1-avb6-TA14- | 1050 | cPrpusUfsgsUfuUfaAfcUfaGfcAfuUfgUfaUfsg | 748 |
| | csauacaauGfCfUfaguuaaacaas(invAb) | | | |
| AC001961 | Tri-SM6.1-avb6-TA14- | 1043 | cPrpasGfsusAfgAfaAfuAfcCfaUfcUfuGfgAfsc | 749 |
| | gsuccaagaUfGfGfuauuucuacus(invAb) | | | |
| AC001962 | Tri-SM6.1-avb6-TA14- | 1054 | cPrpusGfsusAfgAfaAfuAfcCfaUfcUfuGfgAfsc | 750 |
| | gsuccaagaUfGfGfuauuucuacas(invAb) | | | |
| AC002617 | Tri-SM6.1-avb6-TA14- | 1055 | cPrpuUfaGfgauuuucCfaCfuAfcuuscsg | 788 |
| | csgaaguagUfgGfaAfaauccuaas(invAb) | | | |
| AC002618 | Tri-SM6.1-avb6-TA14- | 1055 | cPrpusUfsaGfgauuuucCfaCfuAfcuuscsg | 793 |
| | csgaaguagUfgGfaAfaauccuaas(invAb) | | | |
| AC002619 | Tri-SM6.1-avb6-TA14- | 1056 | cPrpusUfsuGfuaaucagUfuCfcUfuguscsc | 767 |
| | gsgacaaggAfaCfuGfauuacaaas(invAb) | | | |
| AC002620 | Tri-SM6.1-avb6-TA14- | 1038 | cPrpusCfsusUfaagauugUfcAfaAfggugsc | 776 |
| | gscaccuuuGfAfCfaaucuuaagas(invAb) | | | |
| AC002621 | Tri-SM6.1-avb6-TA14- | 1057 | cPrpusUfsasGfuAfgGfuAfuAfaCfcAfcAfgCfsa | 779 |
| | usgcuguggUfUfAfuaccuacuaas(invAb) | | | |
| AC002622 | Tri-SM6.1-avb6-TA14- | 1058 | cPrpusUfsgUfuuaacuaGfcAfuUfguasusg | 756 |
| | csauacaauGfcUfaGfuuaaacaas(invAb) | | | |
| AC002623 | Tri-SM6.1-avb6-TA14- | 1059 | cPrpusAfsasGfuuuacauCfcUfgAfuuacsg | 772 |
| | csguaaucaGfgAfuGfuaaacuuas(invAb) | | | |

[0227] In some embodiments, a CoV RNAi agent is prepared or provided as a salt, mixed salt, or a free-acid. In some embodiments, a CoV RNAi agent is prepared or provided as a pharmaceutically acceptable salt. In some embodiments, a CoV RNAi agent is prepared or provided as a pharmaceutically acceptable sodium or potassium salt The RNAi agents described herein, upon delivery to a cell expressing a SARS-CoV-2 viral genome, inhibit or knockdown expression of one or more SARS-CoV-2 viral genomes in vivo and/or in vitro.

### Targeting Groups, Linking Groups, Pharmacokinetic/Pharmacodynamic (PK/PD) Modulators, and Delivery Vehicles

[0228] In some embodiments, a CoV RNAi agent contains or is conjugated to one or more non-nucleotide groups including, but not limited to, a targeting group, a linking group, a pharmacokinetic/pharmacodynamic (PK/PD) modulator, a delivery polymer, or a delivery vehicle. The non-nucleotide group can enhance targeting, delivery, or attachment of the RNAi agent. The non-nucleotide group can be covalently linked to the 3′ and/or 5′ end of either the sense strand and/or the antisense strand. In some embodiments, a CoV RNAi agent contains a non-nucleotide group linked to the 3′ and/or 5′ end of the sense strand. In some embodiments, a non-nucleotide group is linked to the 5′ end of a CoV RNAi agent sense strand. A non-nucleotide group can be linked directly or indirectly to the RNAi agent via a linker/linking group. In some embodiments, a non-nucleotide group is linked to the RNAi agent via a labile, cleavable, or reversible bond or linker.

[0229] In some embodiments, a non-nucleotide group enhances the pharmacokinetic or biodistribution properties of an RNAi agent or conjugate to which it is attached to improve cell- or tissue-specific distribution and cell-specific uptake of the conjugate. In some embodiments, a non-nucleotide group enhances endocytosis of the RNAi agent.

[0230] Targeting groups or targeting moieties enhance the pharmacokinetic or biodistribution properties of a conjugate or RNAi agent to which they are attached to improve cell-specific (including, in some cases, organ specific) distribution and cell-specific (or organ specific) uptake of the conjugate or RNAi agent. A targeting group can be monovalent, divalent, trivalent, tetravalent, or have higher valency for the target to which it is directed. Representative targeting groups include, without limitation, compounds with affinity to cell surface molecule, cell receptor ligands, hapten, antibodies, monoclonal antibodies, antibody fragments, and antibody mimics with affinity to cell surface molecules. In some embodiments, a targeting group is linked to an RNAi agent using a linker, such as a PEG linker or one, two, or three abasic and/or ribitol (abasic ribose) residues, which in some instances can serve as linkers.

[0231] A targeting group, with or without a linker, can be attached to the 5′ or 3′ end of any of the sense and/or antisense strands disclosed in Tables 2, 3, 4, 5, 6, and 10. A linker, with or without a targeting group, can be attached to the 5′ or 3′ end of any of the sense and/or antisense strands disclosed in Tables 2, 3, 4, 5, 6, and 10.

[0232] The CoV RNAi agents described herein can be synthesized having a reactive group, such as an amino group (also referred to herein as an amine), at the 5′-terminus and/or the 3′-terminus. The reactive group can be used subsequently to attach a targeting moiety using methods typical in the art.

[0233] For example, in some embodiments, the CoV RNAi agents disclosed herein are synthesized having an NH2-C6 group at the 5′-terminus of the sense strand of the RNAi agent. The terminal amino group subsequently can be reacted to form a conjugate with, for example, a group that includes an αvβ6 integrin targeting ligand. In some embodiments, the CoV RNAi agents disclosed herein are synthesized having one or more alkyne groups at the 5′-terminus of the sense strand of the RNAi agent. The terminal alkyne group(s) can subsequently be reacted to form a conjugate with, for example, a group that includes an αvβ6 integrin targeting ligand.

[0234] In some embodiments, a targeting group comprises an integrin targeting ligand. In some embodiments, an integrin targeting ligand is an αvβ6 integrin targeting ligand. The use of an αvβ6 integrin targeting ligand facilitates cell-specific targeting to cells having αvβ6 on its respective surface, and binding of the integrin targeting ligand can facilitate entry of the therapeutic agent, such as an RNAi agent, to which it is linked, into cells such as epithelial cells, including pulmonary epithelial cells and renal epithelial cells. Integrin targeting ligands can be monomeric or monovalent (e.g., having a single integrin targeting moiety) or multimeric or multivalent (e.g., having multiple integrin targeting moieties). The targeting group can be attached to the 3′ and/or 5′ end of the RNAi oligonucleotide using methods known in the art. The preparation of targeting groups, such as αvβ6 integrin targeting ligands, is described, for example, in International Patent Application Publication No. WO 2018/085415 and in International Patent Application Publication No. WO 2019/089765, the contents of each of which are incorporated herein in its entirety.

[0235] In some embodiments, targeting groups are linked to the CoV RNAi agents without the use of an additional linker. In some embodiments, the targeting group is designed having a linker readily present to facilitate the linkage to a CoV RNAi agent. In some embodiments, when two or more RNAi agents are included in a composition, the two or more RNAi agents can be linked to their respective targeting groups using the same linkers. In some embodiments, when two or more RNAi agents are included in a composition, the two or more RNAi agents are linked to their respective targeting groups using different linkers.

[0236] In some embodiments, a linking group is conjugated to the RNAi agent. The linking group facilitates covalent linkage of the agent to a targeting group, pharmacokinetic modulator, delivery polymer, or delivery vehicle. The linking group can be linked to the 3′ and/or the 5′ end of the RNAi agent sense strand or antisense strand. In some embodiments, the linking group is linked to the RNAi agent sense strand. In some embodiments, the linking group is conjugated to the 5′ or 3′ end of an RNAi agent sense strand. In some embodiments, a linking group is conjugated to the 5′ end of an RNAi agent sense strand. Examples of linking groups, include but are not limited to: C6-SS-C6, 6-SS-6, reactive groups such a primary amines (e.g., NH2-C6) and alkynes, alkyl groups, abasic residues/nucleotides, amino acids, tri-alkyne functionalized groups, ribitol, and/or PEG groups. Examples of certain linking groups are provided in Table 11.

[0237] A linker or linking group is a connection between two atoms that links one chemical group (such as an RNAi agent) or segment of interest to another chemical group (such as a targeting group, pharmacokinetic modulator, or delivery polymer) or segment of interest via one or more covalent bonds. A labile linkage contains a labile bond. A linkage can optionally include a spacer that increases the distance between the two joined atoms. A spacer may further add flexibility and/or length to the linkage. Spacers include, but are not limited to, alkyl groups, alkenyl groups, alkynyl groups, aryl groups, aralkyl groups, aralkenyl groups, and aralkynyl groups; each of which can contain one or more heteroatoms, heterocycles, amino acids, nucleotides, and saccharides. Spacer groups are well known in the art and the preceding list is not meant to limit the scope of the description. In some embodiments, a CoV RNAi agent is conjugated to a polyethylene glycol (PEG) moiety, or to a hydrophobic group having 12 or more carbon atoms, such as a cholesterol or palmitoyl group.

[0238] In some embodiments, a CoV RNAi agent is linked to one or more pharmacokinetic/pharmacodynamic (PK/PD) modulators. PK/PD modulators can increase circulation time of the conjugated drug and/or increase the activity of the RNAi agent through improved cell receptor binding, improved cellular uptake, and/or other means. Various PK/PD modulators suitable for use with RNAi agents are known in the art. In some embodiments, the PK/PD modulatory can be cholesterol or cholesteryl derivatives, or in some circumstances a PK/PD modulator can be comprised of alkyl groups, alkenyl groups, alkynyl groups, aryl groups, aralkyl groups, aralkenyl groups, or aralkynyl groups, each of which may be linear, branched, cyclic, and/or substituted or unsubstituted. In some embodiments, the location of attachment for these moieties is at the 5′ or 3′ end of the sense strand, at the 2′ position of the ribose ring of any given nucleotide of the sense strand, and/or attached to the phosphate or phosphorothioate backbone at any position of the sense strand.

[0239] Any of the CoV RNAi agent nucleotide sequences listed in Tables 2, 3, 4, 5, 6, and 10, whether modified or unmodified, can contain 3′ and/or 5′ targeting group(s), linking group(s), and/or PK/PD modulator(s). Any of the CoV RNAi agent sequences listed in Tables 3, 4, 5, 6, and 10, or are otherwise described herein, which contain a 3′ or 5′ targeting group, linking group, and/or PK/PD modulator can alternatively contain no 3′ or 5′ targeting group, linking group, or PK/PD modulator, or can contain a different 3′ or 5′ targeting group, linking group, or pharmacokinetic modulator including, but not limited to, those depicted in Table 11. Any of the CoV RNAi agent duplexes listed in Tables 7A, 7B, 8, 9, and 10, whether modified or unmodified, can further comprise a targeting group or linking group, including, but not limited to, those depicted in Table 11, and the targeting group or linking group can be attached to the 3′ or 5′ terminus of either the sense strand or the antisense strand of the CoV RNAi agent duplex.

[0240] Examples of certain modified nucleotides, capping moieties, and linking groups are provided in Table 11.

```
TABLE 11
Structures Representing Various Modified Nucleotides, Capping Moieties, and Linking Groups (wherein [symbol]     indicates the point of connection)

[chemical structure]

[chemical structure]

[chemical structure]

[chemical structure]

[chemical structure]

[chemical structure]

[chemical structure]







                    When positioned internally:

[chemical structure]

                    When positioned internally:

[chemical structure]

                    When positioned at the 3′ terminal end:

[chemical structure]

      When positioned at the 3′ terminal end:

[chemical structure]

(C6-SS-C6)
      When positioned internally:

[chemical structure]

(C6-SS-C6)
      When positioned at the 3′ terminal end:

[chemical structure]

(6-SS-6)
      When positioned internally:

[chemical structure]

(6-SS-6)

[chemical structure]

[chemical structure]

[chemical structure]

[chemical structure]

[chemical structure]

[chemical structure]

[chemical structure]

[chemical structure]

[chemical structure]

[chemical structure]

[chemical structure]

[chemical structure]

[chemical structure]

[chemical structure]

[chemical structure]















```

[0241] Alternatively, other linking groups known in the art may be used. In many instances, linking groups can be commercially acquired or alternatively, are incorporated into commercially available nucleotide phosphoramidites. (See, e.g., International Patent Application Publication No. WO 2019/161213, which is incorporated herein by reference in its entirety).

[0242] In some embodiments, a CoV RNAi agent is delivered without being conjugated to a targeting ligand or pharmacokinetic/pharmacodynamic (PK/PD) modulator (referred to as being “naked” or a “naked RNAi agent”).

[0243] In some embodiments, a CoV RNAi agent is conjugated to a targeting group, a linking group, a PK modulator, and/or another non-nucleotide group to facilitate delivery of the CoV RNAi agent to the cell or tissue of choice, for example, to an epithelial cell in vivo. In some embodiments, a CoV RNAi agent is conjugated to a targeting group wherein the targeting group includes an integrin targeting ligand. In some embodiments, the integrin targeting ligand is an αvβ6 integrin targeting ligand. In some embodiments, a targeting group includes one or more αvβ6 integrin targeting ligands.

[0244] In some embodiments, a delivery vehicle may be used to deliver an RNAi agent to a cell or tissue. A delivery vehicle is a compound that improves delivery of the RNAi agent to a cell or tissue. A delivery vehicle can include, or consist of, but is not limited to: a polymer, such as an amphipathic polymer, a membrane active polymer, a peptide, a melittin peptide, a melittin-like peptide (MLP), a lipid, a reversibly modified polymer or peptide, or a reversibly modified membrane active polyamine.

[0245] In some embodiments, the RNAi agents can be combined with lipids, nanoparticles, polymers, liposomes, micelles, DPCs or other delivery systems available in the art for nucleic acid delivery. The RNAi agents can also be chemically conjugated to targeting groups, lipids (including, but not limited to cholesteryl and cholesteryl derivatives), encapsulating in nanoparticles, liposomes, micelles, conjugating to polymers or DPCs (see, for example WO 2000/053722, WO 2008/022309, WO 2011/104169, and WO 2012/083185, WO 2013/032829, WO 2013/158141, each of which is incorporated herein by reference), by iontophoresis, or by incorporation into other delivery vehicles or systems available in the art such as hydrogels, cyclodextrins, biodegradable nanocapsules, bioadhesive microspheres, or proteinaceous vectors. In some embodiments the RNAi agents can be conjugated to antibodies having affinity for pulmonary epithelial cells. In some embodiments, the RNAi agents can be linked to targeting ligands that have affinity for pulmonary epithelial cells or receptors present on pulmonary epithelial cells.

### Pharmaceutical Compositions and Formulations

[0246] The CoV RNAi agents disclosed herein can be prepared as pharmaceutical compositions or formulations (also referred to herein as “medicaments”). In some embodiments, pharmaceutical compositions include at least one CoV RNAi agent. These pharmaceutical compositions are particularly useful in the inhibition of the expression of SARS-CoV-2 RNA or another CoV RNA transcript in a target cell, a group of cells, a tissue, or an organism. The pharmaceutical compositions can be used to treat a subject having a disease, disorder, or condition that would benefit from reduction in the level of the target coronavirus mRNA or RNA transcript, or inhibition in expression of the target viral genome. The pharmaceutical compositions can be used to treat a subject at risk of developing a disease or disorder that would benefit from reduction of the level of the target RNA or the target viral genome. In one embodiment, the method includes administering a CoV RNAi agent linked to a targeting ligand as described herein, to a subject to be treated. In some embodiments, one or more pharmaceutically acceptable excipients (including vehicles, carriers, diluents, and/or delivery polymers) are added to the pharmaceutical compositions that include a CoV RNAi agent, thereby forming a pharmaceutical formulation or medicament suitable for in vivo delivery to a subject, including a human.

[0247] The pharmaceutical compositions that include a CoV RNAi agent and methods disclosed herein decrease the level of the target coronavirus RNA in a cell, group of cells, group of cells, tissue, organ, or subject, including by administering to the subject a therapeutically effective amount of a herein described CoV RNAi agent, thereby inhibiting the expression of SARS-CoV-2 RNA or another CoV RNA or RNA transcript in the subject. In some embodiments, the subject has been previously identified or diagnosed as having a disease or disorder related to CoV infection, including SARS-CoV-2 infection, such as COVID-19. In some embodiments, the subject has been previously diagnosed with having pulmonary inflammation or other pulmonary symptoms consistent with a CoV infection.

[0248] Embodiments of the present disclosure include pharmaceutical compositions for delivering a CoV RNAi agent to a pulmonary epithelial cell in vivo. Such pharmaceutical compositions can include, for example, a CoV RNAi agent conjugated to a targeting group that comprises an integrin targeting ligand. In some embodiments, the integrin targeting ligand is comprised of an αvβ6 integrin ligand.

[0249] In some embodiments, the described pharmaceutical compositions including a CoV RNAi agent are used for treating or managing clinical presentations in a subject that would benefit from the inhibition of expression of SARS-CoV-2. In some embodiments, a therapeutically or prophylactically effective amount of one or more of pharmaceutical compositions is administered to a subject in need of such treatment. In some embodiments, administration of any of the disclosed CoV RNAi agents can be used to decrease the number, severity, and/or frequency of symptoms of a disease in a subject.

[0250] In some embodiments, the described CoV RNAi agents are optionally combined with one or more additional (i.e., second, third, etc.) therapeutics. A second therapeutic can be another CoV RNAi agent (e.g., a CoV RNAi agent that targets a different sequence within a SARS-CoV-2 viral genome). In some embodiments, a second therapeutic can be an RNAi agent that targets the SARS-CoV-2 viral genome or the genome of a different coronavirus. An additional therapeutic can also be a small molecule drug, antibody, antibody fragment. peptide, vaccine. and/or aptamer. The CoV RNAi agents, with or without the one or more additional therapeutics, can be combined with one or more excipients to form pharmaceutical compositions.

[0251] The described pharmaceutical compositions that include a CoV RNAi agent can be used to treat at least one symptom in a subject having a disease or disorder caused by a coronavirus infection. In some embodiments, the subject is administered a therapeutically effective amount of one or more pharmaceutical compositions that include a CoV RNAi agent thereby treating the symptom. In other embodiments, the subject is administered a prophylactically effective amount of one or more CoV RNAi agents, thereby preventing or inhibiting the at least one symptom by preventing the coronavirus from establishing itself and replicating in the cells of the organism.

[0252] In some embodiments, one or more of the described CoV RNAi agents are administered to a mammal in a pharmaceutically acceptable carrier or diluent. In some embodiments, the mammal is a human.

[0253] The route of administration is the path by which a CoV RNAi agent is brought into contact with the body. In general, methods of administering drugs, oligonucleotides, and nucleic acids, for treatment of a mammal are well known in the art and can be applied to administration of the compositions described herein. The CoV RNAi agents disclosed herein can be administered via any suitable route in a preparation appropriately tailored to the particular route. Thus, in some embodiments, the herein described pharmaceutical compositions are administered via inhalation, intranasal administration, intratracheal administration, or oropharyngeal aspiration administration. In some embodiments, the pharmaceutical compositions can be administered by injection, for example, intravenously, intramuscularly, intracutaneously, subcutaneously, intraarticularly, intraocularly, or intraperitoneally, or topically.

[0254] The pharmaceutical compositions including a CoV RNAi agent described herein can be delivered to a cell, group of cells, tissue, or subject using oligonucleotide delivery technologies known in the art. In general, any suitable method recognized in the art for delivering a nucleic acid molecule (in vitro or in vivo) can be adapted for use with the compositions described herein. For example, delivery can be by local administration, (e.g., direct injection, implantation, or topical administering), systemic administration, or subcutaneous, intravenous, intraperitoneal, or parenteral routes, including intracranial (e.g., intraventricular, intraparenchymal and intrathecal), intramuscular, transdermal, airway (aerosol), nasal, oral, rectal, or topical (including buccal and sublingual) administration. In some embodiments, the compositions are administered via inhalation, intranasal administration, oropharyngeal aspiration administration, or intratracheal administration. For example, in some embodiments, it is desired that the CoV RNAi agents described herein inhibit the expression of a SARS-CoV-2 viral genome or the genome of another coronavirus in the pulmonary epithelium, for which administration via inhalation (e.g., by an inhaler device, such as a metered-dose inhaler, or a nebulizer such as a jet or vibrating mesh nebulizer, or a soft mist inhaler) is particularly suitable and advantageous

[0255] In some embodiments, the pharmaceutical compositions described herein comprise one or more pharmaceutically acceptable excipients. The pharmaceutical compositions described herein are formulated for administration to a subject.

[0256] As used herein, a pharmaceutical composition or medicament includes a pharmacologically effective amount of at least one of the described therapeutic compounds and one or more pharmaceutically acceptable excipients. Pharmaceutically acceptable excipients (excipients) are substances other than the Active Pharmaceutical Ingredient (API, therapeutic product, e.g., CoV RNAi agent) that are intentionally included in the drug delivery system. Excipients do not exert or are not intended to exert a therapeutic effect at the intended dosage. Excipients can act to a) aid in processing of the drug delivery system during manufacture, b) protect, support or enhance stability, bioavailability or patient acceptability of the API, c) assist in product identification, and/or d) enhance any other attribute of the overall safety, effectiveness, of delivery of the API during storage or use. A pharmaceutically acceptable excipient may or may not be an inert substance.

[0257] Excipients include, but are not limited to: absorption enhancers, anti-adherents, anti-foaming agents, anti-oxidants, binders, buffering agents, carriers, coating agents, colors, delivery enhancers, delivery polymers, detergents, dextran, dextrose, diluents, disintegrants, emulsifiers, extenders, fillers, flavors, glidants, humectants, lubricants, oils, polymers, preservatives, saline, salts, solvents, sugars, surfactants, suspending agents, sustained release matrices, sweeteners, thickening agents, tonicity agents, vehicles, water-repelling agents, and wetting agents.

[0258] Pharmaceutical compositions suitable for injectable use include sterile aqueous solutions (where water-soluble) or dispersions and sterile powders for the extemporaneous preparation of sterile injectable solutions or dispersion. For intravenous administration, suitable carriers include physiological saline, bacteriostatic water, Cremophor® ELTM (BASF, Parsippany, NJ) or phosphate buffered saline (PBS). It should be stable under the conditions of manufacture and storage and should be preserved against the contaminating action of microorganisms such as bacteria and fungi. The carrier can be a solvent or dispersion medium containing, for example, water, ethanol, polyol (for example, glycerol, propylene glycol, and liquid polyethylene glycol), and suitable mixtures thereof. The proper fluidity can be maintained, for example, by the use of a coating such as lecithin, by the maintenance of the required particle size in the case of dispersion and by the use of surfactants. In many cases, it will be preferable to include isotonic agents, for example, sugars, polyalcohols such as mannitol, sorbitol, and sodium chloride in the composition. Prolonged absorption of the injectable compositions can be brought about by including in the composition an agent which delays absorption, for example, aluminum monostearate and gelatin.

[0259] Sterile injectable solutions can be prepared by incorporating the active compound in the required amount in an appropriate solvent with one or a combination of ingredients enumerated above, as required, followed by filter sterilization. Generally, dispersions are prepared by incorporating the active compound into a sterile vehicle which contains a basic dispersion medium and the required other ingredients from those enumerated above. In the case of sterile powders for the preparation of sterile injectable solutions, methods of preparation include vacuum drying and freeze-drying which yields a powder of the active ingredient plus any additional desired ingredient from a previously sterile-filtered solution thereof.

[0260] Formulations suitable for intra-articular administration can be in the form of a sterile aqueous preparation of the drug that can be in microcrystalline form, for example, in the form of an aqueous microcrystalline suspension. Liposomal formulations or biodegradable polymer systems can also be used to present the drug for both intra-articular and ophthalmic administration.

[0261] Formulations suitable for inhalation administration can be prepared by incorporating the active compound in the desired amount in an appropriate solvent, followed by sterile filtration. In general, formulations for inhalation administration are sterile solutions at physiological pH and have low viscosity (<5 cP). Salts may be added to the formulation to balance tonicity. In some cases, surfactants or co-solvents can be added to increase active compound solubility and improve aerosol characteristics. In some cases, excipients can be added to control viscosity in order to ensure size and distribution of nebulized droplets.

[0262] In some embodiments, pharmaceutical formulations that include the CoV RNAi agents disclosed herein suitable for inhalation administration can be prepared in water for injection (sterile water), or an aqueous sodium phosphate buffer (for example, the CoV RNAi agent formulated in 0.5 mM sodium phosphate monobasic, 0.5 mM sodium phosphate dibasic, in water).

[0263] The active compounds can be prepared with carriers that will protect the compound against rapid elimination from the body, such as a controlled release formulation, including implants and microencapsulated delivery systems. Biodegradable, biocompatible polymers can be used, such as ethylene vinyl acetate, polyanhydrides, polyglycolic acid, collagen, polyorthoesters, and polylactic acid. Methods for preparation of such formulations will be apparent to those skilled in the art. Liposomal suspensions can also be used as pharmaceutically acceptable carriers. These can be prepared according to methods known to those skilled in the art, for example, as described in U.S. Pat. No. 4,522,811.

[0264] The CoV RNAi agents can be formulated in compositions in dosage unit form for ease of administration and uniformity of dosage. Dosage unit form refers to physically discrete units suited as unitary dosages for the subject to be treated; each unit containing a predetermined quantity of active compound calculated to produce the desired therapeutic effect in association with the required pharmaceutical carrier. The specification for the dosage unit forms of the disclosure are dictated by and directly dependent on the unique characteristics of the active compound and the therapeutic effect to be achieved, and the limitations inherent in the art of compounding such an active compound for the treatment of individuals.

[0265] A pharmaceutical composition can contain other additional components commonly found in pharmaceutical compositions. Such additional components include, but are not limited to: anti-prurities, astringents, local anesthetics, or anti-inflammatory agents (e.g., antihistamine, diphenhydramine, etc.). It is also envisioned that cells, tissues, or isolated organs that express or comprise the herein defined RNAi agents may be used as “pharmaceutical compositions.” As used herein, “pharmacologically effective amount,” “therapeutically effective amount,” or simply “effective amount” refers to that amount of an RNAi agent to produce a pharmacological, therapeutic, or preventive result.

[0266] In some embodiments, the methods disclosed herein further comprise the step of administering a second therapeutic or treatment in addition to administering an RNAi agent disclosed herein. In some embodiments, the second therapeutic is another CoV RNAi agent (e.g., a CoV RNAi agent that targets a different sequence within the SARS-CoV-2 target). In other embodiments, the second therapeutic can be a small molecule drug, an antibody, an antibody fragment, a peptide, a vaccine, and/or an aptamer.

[0267] In some embodiments, described herein are compositions that include a combination or cocktail of at least two CoV RNAi agents having different sequences. In some embodiments, the two or more CoV RNAi agents are each separately and independently linked to targeting groups. In some embodiments, the two or more CoV RNAi agents are each linked to targeting groups that include or consist of integrin targeting ligands. In some embodiments, the two or more CoV RNAi agents are each linked to targeting groups that include or consist of αvβ6 integrin targeting ligands.

[0268] In some embodiments, described herein are compositions that include a combination or cocktail of one or more CoV RNAi agents and RNAi agents targeting other genes associated with causing CoV-related diseases. The other genes associated with causing CoV-related diseases can be, but are not limited to, genes that are associated with the severity of CoV-related diseases. In some embodiments, the combination of CoV RNAi agent(s) and RNAi agents targeting other genes associated with causing CoV-related diseases are each linked to targeting groups that include or consist of αvβ6 integrin targeting ligands. In some embodiments, CoV RNAi(s) are used in combination with RNAi agents targeting other genes associated with causing CoV-related diseases. In some embodiments the RNAi agents targeting other genes associated with causing CoV-related diseases are RNAi agents targeting to transmembrane serine protease 2 (TMPRSS2).

[0269] Described herein are compositions for delivery of CoV RNAi agents to pulmonary epithelial cells.

[0270] Generally, an effective amount of a CoV RNAi agent disclosed herein will be in the range of from about 0.0001 to about 30 mg/kg of body weight/deposited dose, e.g., from about 0.001 to about 5 mg/kg of body weight/deposited dose. In some embodiments, an effective amount of a CoV RNAi agent will be in the range of from about 0.01 mg/kg to about 3.0 mg/kg of body weight per deposited dose. In some embodiments, an effective amount of a CoV RNAi agent will be in the range of from about 0.03 mg/kg to about 2.0 mg/kg of body weight per deposited dose. In some embodiments, an effective amount of a CoV RNAi agent will be in the range of from about 0.01 to about 1.0 mg/kg of deposited dose per body weight. In some embodiments, an effective amount of a CoV RNAi agent will be in the range of from about 0.50 to about 1.0 mg/kg of deposited dose per body weight. The amount administered will also likely depend on such variables as the overall health status of the patient, the relative biological efficacy of the compound delivered, the formulation of the drug, the presence and types of excipients in the formulation, and the route of administration. Also, it is to be understood that the initial dosage administered can be increased beyond the above upper level to rapidly achieve the desired blood-level or tissue level, or the initial dosage can be smaller than the optimum. In some embodiments, a dose is administered daily. In some embodiments, a dose is administered weekly. In further embodiments, a dose is administered bi-weekly, tri-weekly, once monthly, or once quarterly (i.e., once every three months).

[0271] For treatment of disease or for formation of a medicament or composition for treatment of a disease, the pharmaceutical compositions described herein including a CoV RNAi agent can be combined with an excipient or with a second therapeutic agent or treatment including, but not limited to: a second or other RNAi agent, a small molecule drug, an antibody, an antibody fragment, a peptide, a vaccine and/or an aptamer.

[0272] The described CoV RNAi agents, when added to pharmaceutically acceptable excipients or adjuvants, can be packaged into kits, containers, packs, or dispensers. The pharmaceutical compositions described herein can be packaged in dry powder or aerosol inhalers, other metered-dose inhalers, nebulizers, pre-filled syringes, or vials.

### Methods of Treatment and Inhibition of CoV Viral Genomes

[0273] The CoV RNAi agents disclosed herein can be used to treat a subject (e.g., a human or other mammal) having a disease or disorder that would benefit from administration of the RNAi agent. In some embodiments, the RNAi agents disclosed herein can be used to treat a subject (e.g., a human) that would benefit from a reduction and/or inhibition in expression of SARS-CoV-2 mRNA and/or viral transcripts, or a reduction and/or inhibition of another coronavirus that is infecting the subject.

[0274] In some embodiments, the RNAi agents disclosed herein can be used to treat a subject (e.g., a human) having a disease or disorder caused by a coronavirus infection, including but not limited to, pulmonary inflammation or COVID-19. Treatment of a subject can include therapeutic and/or prophylactic treatment. The subject is administered a therapeutically effective amount of any one or more CoV RNAi agents described herein. The subject can be a human, patient, or human patient. The subject may be an adult, adolescent, child, or infant. Administration of a pharmaceutical composition described herein can be to a human being or animal.

[0275] In certain embodiments, the present disclosure provides methods for treatment of diseases, disorders, conditions, or pathological states mediated at least in part by SARS-CoV-2 viral genome expression, in a patient in need thereof, wherein the methods include administering to the patient any of the CoV RNAi agents described herein.

[0276] In some embodiments, the CoV RNAi agents are used to treat or manage a clinical presentation or pathological state in a subject, wherein the clinical presentation or pathological state is caused by a coronavirus infection. The subject is administered a therapeutically effective amount of one or more of the CoV RNAi agents or CoV RNAi agent-containing compositions described herein. In some embodiments, the method comprises administering a composition comprising a CoV RNAi agent described herein to a subject to be treated.

[0277] In a further aspect, the disclosure features methods of treatment (including prophylactic or preventative treatment) of diseases or symptoms that may be addressed by a reduction in CoV mRNA or RNA transcripts, including for example a reduction in SARS-CoV-2 mRNA or RNA transcripts, the methods comprising administering to a subject in need thereof a CoV RNAi agent that includes an antisense strand comprising the sequence of any of the sequences in Table 2, Table 3, or Table 10. Also described herein are compositions for use in such methods.

[0278] In another aspect, the disclosure provides methods for the treatment (including prophylactic treatment) of a pathological state (such as a condition or disease) caused by a coronavirus infection, such as COVID-19, wherein the methods include administering to a subject a therapeutically effective amount of an RNAi agent that includes an antisense strand comprising the sequence of any of the sequences in Table 2, Table 3, or Table 10.

[0279] In some embodiments, methods for inhibiting expression of a SARS-CoV-2 viral genome are disclosed herein, wherein the methods include administering to a cell an RNAi agent that includes an antisense strand comprising the sequence of any of the sequences in Table 2, Table 3, or Table 10.

[0280] In some embodiments, methods for the treatment (including prophylactic treatment) of a pathological state mediated at least in part by SARS-CoV-2 viral RNA are disclosed herein, wherein the methods include administering to a subject a therapeutically effective amount of an RNAi agent that includes a sense strand comprising the sequence of any of the sequences in Table 2, Table 4, Table 5, Table 6, or Table 10.

[0281] In some embodiments, methods for inhibiting expression of a SARS-CoV-2 viral genome are disclosed herein, wherein the methods comprise administering to a cell an RNAi agent that includes a sense strand comprising the sequence of any of the sequences in Table 2, Table 4, Table 5, Table 6, or Table 10.

[0282] In some embodiments, methods for the treatment (including prophylactic treatment) of a pathological state mediated at least in part by SARS-CoV-2 viral RNA are disclosed herein, wherein the methods include administering to a subject a therapeutically effective amount of an RNAi agent that includes a sense strand comprising the sequence of any of the sequences in Table 4, Table 5, Table 6, or Table 10, and an antisense strand comprising the sequence of any of the sequences in Table 3 or Table 10.

[0283] In some embodiments, methods for inhibiting expression of a SARS-CoV-2 viral genome are disclosed herein, wherein the methods include administering to a cell an RNAi agent that includes a sense strand comprising the sequence of any of the sequences in Table 4. Table 5, Table 6, or Table 10, and an antisense strand comprising the sequence of any of the sequences in Table 3 or Table 10.

[0284] In some embodiments, methods of inhibiting expression of a SARS-CoV-2 viral genome are disclosed herein, wherein the methods include administering to a subject a CoV RNAi agent that includes a sense strand consisting of the nucleobase sequence of any of the sequences in Table 4, Table 5, Table 6, or Table 10, and the antisense strand consisting of the nucleobase sequence of any of the sequences in Table 3 or Table 10. In other embodiments, disclosed herein are methods of inhibiting expression of a SARS-CoV-2 viral genome, wherein the methods include administering to a subject a CoV RNAi agent that includes a sense strand consisting of the modified sequence of any of the modified sequences in Table 4, Table 5, Table 6, or Table 10, and the antisense strand consisting of the modified sequence of any of the modified sequences in Table 3 or Table 10.

[0285] In some embodiments, methods for inhibiting expression of a SARS-CoV-2 viral genome in a cell are disclosed herein, wherein the methods include administering one or more CoV RNAi agents comprising a duplex structure of one of the duplexes set forth in Tables 7A, 7B, 8, 9, and 10.

[0286] In some embodiments, the SARS-CoV-2 viral RNA level in certain epithelial cells of subject to whom a described CoV RNAi agent is administered is reduced by at least about 5%, 10%, 15%, 20%, 25%, 30%, 35%, 40%, 45%, 50%, 55%, 60%, 65%, 70%, 75%, 80%, 85%, 90%, 95%, 96%, 97%, 98%, 99%, or greater than 99%, relative to the subject prior to being administered the CoV RNAi agent or to a subject not receiving the CoV RNAi agent. In some embodiments, the SARS-CoV-2 subgenomic RNA levels in certain epithelial cells of a subject to whom a described CoV RNAi agent is administered is reduced by at least about 5%, 10%, 15%, 20%, 25%, 30%, 35%, 40%, 45%, 50%, 55%, 60%, 65%, 70%, 75%, 80%, 85%, 90%, 95%, 96%, 97%, 98%, 99%, or greater than 99%, relative to the subject prior to being administered the CoV RNAi agent or to a subject not receiving the CoV RNAi agent. The viral RNA transcript level, mRNA level, and/or subgenomic RNA level in the subject may be reduced in a cell, group of cells, and/or tissue of the subject. In some embodiments, the SARS-CoV-2 mRNA levels in certain epithelial cells subject to whom a described CoV RNAi agent has been administered is reduced by at least about 30%, 35%, 40%, 45%, 50%, 55%, 60%, 65%, 70%, 75%, 80%, 85%, 90%, 95%, or 98% relative to the subject prior to being administered the CoV RNAi agent or to a subject not receiving the CoV RNAi agent.

[0287] In some embodiments, methods for the treatment (including prophylactic treatment) of a pathological state mediated at least in part by SARS-CoV-2 viral RNA are disclosed herein, wherein the methods include administering to a subject a therapeutically effective amount of a combination of an RNAi agent that includes a sense strand comprising the sequence of any of the sequences in Table 4, Table 5, Table 6, or Table 10, and an antisense strand comprising the sequence of any of the sequences in Table 3 or Table 10, in addition to RNAi agents targeting other genes associated with causing CoV-related diseases. The other genes associated with causing CoV-related diseases can be, but are not limited to, genes that are associated with the severity of CoV-related diseases. In some embodiments, the combination of CoV RNAi agent(s) and RNAi agents targeting other genes associated with causing CoV-related diseases are each linked to targeting groups that include or consist of αvβ6 integrin targeting ligands. In some embodiments, CoV RNAi(s) are used in combination with RNAi agents targeting other genes associated with causing CoV-related diseases. In some embodiments the RNAi agents targeting other genes associated with causing CoV-related diseases are RNAi agents targeting to transmembrane serine protease 2 (TMPRSS2).

[0288] Reductions in viral RNA can be assessed by any methods known in the art and are collectively referred to herein as a decrease in, reduction of, or inhibition of SARS-CoV-2. The Examples set forth herein illustrate known methods for assessing inhibition of SARS-CoV-2 viral RNA.

### Cells, Tissues, Organs, and Non-Human Organisms

[0289] Cells, tissues, organs, and non-human organisms that include at least one of the CoV RNAi agents described herein are contemplated. The cell, tissue, organ, or non-human organism is made by delivering the RNAi agent to the cell, tissue, organ, or non-human organism.

### ADDITIONAL ILLUSTRATIVE EMBODIMENTS

[0290] Provided here are certain additional illustrative embodiments of the disclosed technology. These embodiments are illustrative only and do not limit the scope of the present disclosure or of the claims attached hereto.

[0291] Embodiment 1. An RNAi agent for inhibiting expression of a coronavirus (CoV) genome, comprising:
[0292] an antisense strand comprising at least 17 contiguous nucleotides differing by 0 or 1 nucleotides from any one of the sequences provided in Table 2 or Table 3; and
[0293] a sense strand comprising a nucleotide sequence that is at least partially complementary to the antisense strand.

[0294] Embodiment 2. The RNAi agent of embodiment 1, wherein the antisense strand comprises nucleotides 2-18 of any one of the sequences provided in Table 2 or Table 3.

[0295] Embodiment 3. The RNAi agent of embodiment 1 or embodiment 2, wherein the sense strand comprises a nucleotide sequence of at least 17 contiguous nucleotides differing by 0 or 1 nucleotides from any one of the sequences provided in Table 2 or Table 4, and wherein the sense strand has a region of at least 85% complementarity over the 17 contiguous nucleotides to the antisense strand.

[0296] Embodiment 4. The RNAi agent of any one of embodiments 1-3, wherein at least one nucleotide of the RNAi agent is a modified nucleotide or includes a modified internucleoside linkage.

[0297] Embodiment 5. The RNAi agent of any one of embodiments 1-4, wherein all or substantially all of the nucleotides are modified nucleotides.

[0298] Embodiment 6. The RNAi agent of any one of embodiments 4-5, wherein the modified nucleotide is selected from the group consisting of: 2′-O-methyl nucleotide, 2′-fluoro nucleotide, 2′-deoxy nucleotide, 2′,3′-seco nucleotide mimic, locked nucleotide, 2′-F-arabino nucleotide, 2′-methoxyethyl nucleotide, abasic nucleotide, ribitol, inverted nucleotide, inverted 2′-O-methyl nucleotide, inverted 2′-deoxy nucleotide, 2′-amino-modified nucleotide, 2′-alkyl-modified nucleotide, morpholino nucleotide, vinyl phosphonate-containing nucleotide, cyclopropyl phosphonate-containing nucleotide, and 3′-O-methyl nucleotide.

[0299] Embodiment 7. The RNAi agent of embodiment 5, wherein all or substantially all of the nucleotides are modified with 2′-O-methyl nucleotides, 2′-fluoro nucleotides, or combinations thereof.

[0300] Embodiment 8. The RNAi agent of any one of embodiments 1-7, wherein the antisense strand comprises the nucleotide sequence of any one of the modified sequences provided in Table 3.

[0301] Embodiment 9. The RNAi agent of any one of embodiments 1-8, wherein the sense strand comprises the nucleotide sequence of any one of the modified sequences provided in Table 4.

[0302] Embodiment 10. The RNAi agent of embodiment 1, wherein the antisense strand comprises the nucleotide sequence of any one of the modified sequences provided in Table 3 and the sense strand comprises the nucleotide sequence of any one of the modified sequences provided in Table 4.

[0303] Embodiment 11. The RNAi agent of any one of embodiments 1-10, wherein the sense strand is between 18 and 30 nucleotides in length, and the antisense strand is between 18 and 30 nucleotides in length.

[0304] Embodiment 12. The RNAi agent of embodiment 11, wherein the sense strand and the antisense strand are each between 18 and 27 nucleotides in length.

[0305] Embodiment 13. The RNAi agent of embodiment 12, wherein the sense strand and the antisense strand are each between 18 and 24 nucleotides in length.

[0306] Embodiment 14. The RNAi agent of embodiment 13, wherein the sense strand and the antisense strand are each 21 nucleotides in length.

[0307] Embodiment 15. The RNAi agent of embodiment 14, wherein the RNAi agent has two blunt ends.

[0308] Embodiment 16. The RNAi agent of any one of embodiments 1-15, wherein the sense strand comprises one or two terminal caps.

[0309] Embodiment 17. The RNAi agent of any one of embodiments 1-16, wherein the sense strand comprises one or two inverted abasic residues.

[0310] Embodiment 18. The RNAi agent of embodiment 1, wherein the RNAi agent is comprised of a sense strand and an antisense strand that form a duplex having the structure of any one of the duplexes in Table 7A, Table 7B, Table 8, Table 9, or Table 10.

[0311] Embodiment 19. The RNAi agent of embodiment 18, wherein all or substantially all of the nucleotides are modified nucleotides.

[0312] Embodiment 20. The RNAi agent of embodiment 1, comprising an antisense strand that consists of, consists essentially of, or comprises a nucleotide sequence that differs by 0 or 1 nucleotides from one of the following nucleotide sequences (5′→3′):

(SEQ ID NO: 1122)
UUAGUAGGUAUAACCACAGCA;
or
(SEQ ID NO: 1113)
UUUGUAAUCAGUUCCUUGUCC.

[0313] Embodiment 21. The RNAi agent of any one of embodiments 1-20, wherein the nucleotides of the antisense strand located at position 2 and position 14 from the 5′-end are 2′-fluoro modified nucleotides.

[0314] Embodiment 22. The RNAi agent of embodiment 21, wherein the nucleotide of the antisense strand at position 2 is a 2′-fluoro uridine, and the nucleotide of the antisense strand at position 14 is a 2′-fluoro cytidine, and wherein the antisense strand comprises 3 or 4 phosphorothioate intemucleoside linkages.

[0315] Embodiment 23. The RNAi agent of any one of embodiments 1-22, wherein the sense strand consists of, consists essentially of, or comprises a nucleotide sequence that differs by 0 or 1 nucleotides from one of the following nucleotide sequences (5′→3′):

(SEQ ID NO: 1198)
UGCUGUGGUUAUACCUACUAA;
or
(SEQ ID NO: 1189)
GGACAAGGAACUGAUUACAAA.

[0316] Embodiment 24. The RNAi agent of any one of embodiments 20-23, wherein all or substantially all of the nucleotides are modified nucleotides.

[0317] Embodiment 25. The RNAi agent of embodiment 1, comprising an antisense strand that comprises, consists of, or consists essentially of a modified nucleotide sequence that differs by 0 or 1 nucleotides from one of the following nucleotide sequences (5′→3′):

(SEQ ID NO: 779)
cPrpusUfsasGfuAfgGfuAfuAfaCfcAfcAfgCfsa;
or
(SEQ ID NO: 746)
cPrpusUfsusGfuAfaUfcAfgUfuCfcUfuGfuCfsc.

[0318] wherein a represents 2′-O-methyl adenosine, c represents 2′-O-methyl cytidine, g represents 2′-O-methyl guanosine, and u represents 2′-O-methyl uridine; Af, represents 2′-fluoro adenosine, Cf represents 2′-fluoro cytidine, Gf represents 2′-fluoro guanosine, and Uf represents 2′-fluoro uridine; cPrpu represents a 5′-cyclopropyl phosphonate-2′-O-methyl uridine; s represents a phosphorothioate linkage; and wherein all or substantially all of the nucleotides on the sense strand are modified nucleotides.

[0319] Embodiment 26. The RNAi agent of embodiment 1, wherein the sense strand comprises, consists of, or consists essentially of a modified nucleotide sequence that differs by 0 or 1 nucleotides from one of the following nucleotide sequences (5′→3′): usgcuguggUfUfAfuaccuacuaas (SEQ ID NO: 1057); or gsgacaaggAfAfCfugauuacaaas (SEQ ID NO: 1046).
[0320] wherein a represents 2′-O-methyl adenosine, c represents 2′-O-methyl cytidine, g represents 2′-O-methyl guanosine, and u represents 2′-O-methyl uridine; Af, represents 2′-fluoro adenosine, Cf represents 2′-fluoro cytidine, Gf represents 2′-fluoro guanosine, and Uf represents 2′-fluoro uridine; s represents a phosphorothioate linkage; and wherein all or substantially all of the nucleotides on the antisense strand are modified nucleotides.

[0321] Embodiment 27. The RNAi agent of any one of embodiments 20-26, wherein the sense strand further includes inverted abasic residues at the 3′ terminal end of the nucleotide sequence, at the 5′ end of the nucleotide sequence, or at both.

[0322] Embodiment 28. The RNAi agent of any one of embodiments 1-27, wherein the RNAi agent is linked to a targeting ligand.

[0323] Embodiment 29. The RNAi agent of embodiment 28, wherein the targeting ligand has affinity for a cell receptor expressed on an epithelial cell.

[0324] Embodiment 30. The RNAi agent of embodiment 29, wherein the targeting ligand comprises an integrin targeting ligand.

[0325] Embodiment 31. The RNAi agent of embodiment 30, wherein the integrin targeting ligand is an αvβ6 integrin targeting ligand.

[0326] Embodiment 32. The RNAi agent of embodiment 31, wherein the targeting ligand comprises the structure:

[chemical structure]

or a pharmaceutically acceptable salt thereof, or

[chemical structure]

or a pharmaceutically acceptable salt thereof, wherein [symbol] indicates the point of connection to the RNAi agent.

[0327] Embodiment 33. The RNAi agent of any one of embodiments 28-31, wherein the targeting ligand has a structure selected from the group consisting of:

[chemical structure]

[chemical structure]

[chemical structure]

[chemical structure]

[chemical structure]

[chemical structure]

[chemical structure]

[chemical structure]

[chemical structure]

[0328] wherein [symbol] indicates the point of connection to the RNAi agent.

[0329] Embodiment 34. The RNAi agent of embodiment 33, wherein RNAi agent is conjugated to a targeting ligand having the following structure:

[chemical structure]

[0330] Embodiment 35. The RNAi agent of any one of embodiments 28-31, wherein the targeting ligand has the following structure:

[chemical structure]

[0331] Embodiment 36. The RNAi agent of any one of embodiments 28-35, wherein the targeting ligand is conjugated to the sense strand.

[0332] Embodiment 37. The RNAi agent of embodiment 36, wherein the targeting ligand is conjugated to the 5′ terminal end of the sense strand.

[0333] Embodiment 38. A composition comprising the RNAi agent of any one of embodiments 1-37, wherein the composition further comprises a pharmaceutically acceptable excipient.

[0334] Embodiment 39. The composition of embodiment 38, further comprising a second RNAi agent capable of inhibiting the expression of a coronavirus (CoV) genome.

[0335] Embodiment 40. The composition of any one of embodiments 38-39, further comprising one or more additional therapeutics.

[0336] Embodiment 41. The composition of any one of embodiments 38-40, wherein the composition is formulated for administration by inhalation.

[0337] Embodiment 42. The composition of embodiment 41, wherein the composition is delivered by a metered-dose inhaler, jet nebulizer, vibrating mesh nebulizer, or soft mist inhaler.

[0338] Embodiment 43. The composition of any of embodiments 38-42, wherein the RNAi agent is a sodium salt.

[0339] Embodiment 44. The composition of any of embodiments 38-43, wherein the pharmaceutically acceptable excipient is water for injection.

[0340] Embodiment 45. The composition of any of embodiments 38-43, wherein the pharmaceutically acceptable excipient is a buffered saline solution.

[0341] Embodiment 46. A method for inhibiting a coronavirus (CoV) genome in a cell, the method comprising introducing into a cell an effective amount of an RNAi agent of any one of embodiments 1-37 or the composition of any one of embodiments 38-45.

[0342] Embodiment 47. The method of embodiment 46, wherein the cell is within a subject.

[0343] Embodiment 48. The method of embodiment 47, wherein the subject is a human subject.

[0344] Embodiment 49. The method of any one of embodiments 46-48, wherein following the administration of the RNAi agent the CoV genome expression is inhibited by at least about 30%.

[0345] Embodiment 50. A method of treating one or more symptoms or diseases associated with coronavirus (CoV) infection, the method comprising administering to a human subject in need thereof a therapeutically effective amount of the composition of any one of embodiments 38-45.

[0346] Embodiment 51. The method of embodiment 50, wherein the diseases is a respiratory disease.

[0347] Embodiment 52. The method of embodiment 51, wherein the respiratory disease is pulmonary inflammation.

[0348] Embodiment 53. The method of embodiment 51, wherein the respiratory disease is COVID-19.

[0349] Embodiment 54. The method of embodiment 50, wherein the symptoms are caused by SARS-CoV-2 viral infection.

[0350] Embodiment 55. The method of any one of embodiments 46-54, wherein the RNAi agent is administered at a deposited dose of about 0.01 mg/kg to about 5.0 mg/kg of body weight of the subject.

[0351] Embodiment 56. The method of any one of embodiments 46-55, wherein the RNAi agent is administered at a deposited dose of about 0.03 mg/kg to about 2.0 mg/kg of body weight of the subject.

[0352] Embodiment 57. The method of any one of claims 46-56, wherein the RNAi agent is administered in two or more doses.

[0353] Embodiment 58. Use of the RNAi agent of any one of embodiments 1-37, for the treatment of a disease, disorder, or symptom that is caused by coronavirus (CoV) infection, preferably wherein the disease, disorder, or symptom can be mediated at least in part by a reduction in SARS-CoV-2 activity and/or SARS-CoV-2 viral genome expression.

[0354] Embodiment 59. Use of the composition according to any one of embodiments 38-45, for the treatment of a disease, disorder, or symptom that is caused by coronavirus (CoV) infection, preferably wherein the disease, disorder, or symptom can be mediated at least in part by a reduction in SARS-CoV-2 activity and/or SARS-CoV-2 viral genome expression.

[0355] Embodiment 60. Use of the composition according to any one of embodiments 38-45, for the manufacture of a medicament for the treatment of a disease, disorder, or symptom that is caused by coronavirus (CoV) infection, preferably wherein the disease, disorder, or symptom can be mediated at least in part by a reduction in SARS-CoV-2 activity and/or SARS-CoV-2 viral genome expression.

[0356] Embodiment 61. The use of any one of embodiments 58-60, wherein the disease is pulmonary inflammation.

[0357] Embodiment 62. A method of making an RNAi agent of any one of embodiments 1-37, comprising annealing a sense strand and an antisense strand to form a double-stranded ribonucleic acid molecule.

[0358] Embodiment 63. The method of embodiment 62, wherein the sense strand comprises a targeting ligand.

[0359] Embodiment 64. The method of embodiment 63, comprising conjugating a targeting ligand to the sense strand.

[0360] The above provided embodiments and items are now illustrated with the following, non-limiting examples.

### EXAMPLES

### Example 1. Synthesis of CoV RNAi Agents

[0361] CoV RNAi agent duplexes disclosed herein were synthesized in accordance with the following:

[0362] A. Synthesis. The sense and antisense strands of the CoV RNAi agents were synthesized according to phosphoramidite technology on solid phase used in oligonucleotide synthesis. Depending on the scale, a MerMade96E® (Bioautomation), a MerMade12® (Bioautomation), or an OP Pilot 100 (GE Healthcare) was used. Syntheses were performed on a solid support made of controlled pore glass (CPG, 500 Å or 600 Å, obtained from Prime Synthesis, Aston, PA, USA). All RNA and 2′-modified RNA phosphoramidites were purchased from Thermo Fisher Scientific (Milwaukee, WI, USA). Specifically, the 2′-O-methyl phosphoramidites that were used included the following: (5′-O-dimethoxytrityl-N⁶-(benzoyl)-2′-O-methyl-adenosine-3′-O-(2-cyanoethyl-N,N-diisopropylamino) phosphoramidite, 5′-O-dimethoxy-trityl-N⁴-(acetyl)-2′-O-methyl-cytidine-3′-O-(2-cyanoethyl-N,N-diisopropyl-amino) phosphoramidite, (5′-O-dimethoxytrityl-N²-(isobutyryl)-2′-O-methyl-guanosine-3′-O-(2-cyanoethyl-N,N-diisopropylamino) phosphoramidite, and 5′-O-dimethoxytrityl-2′-O-methyl-uridine-3′-O-(2-cyanoethyl-N,N-diisopropylamino) phosphoramidite. The 2′-deoxy-2′-fluoro-phosphoramidites carried the same protecting groups as the 2′-O-methyl RNA amidites. 5′-dimethoxytrityl-2′-O-methyl-inosine-3′-O-(2-cyanoethyl-N,N-diisopropylamino) phosphoramidites were purchased from Glen Research (Virginia). The inverted abasic (3′-O-dimethoxytrityl-2′-deoxyribose-5′-O-(2-cyanoethyl-N,N-diisopropylamino) phosphoramidites were purchased from ChemGenes (Wilmington, MA, USA). The following UNA phosphoramidites were used: 5′-(4,4′-Dimethoxytrityl)-N6-(benzoyl)-2′,3′-seco-adenosine, 2′-benzoyl-3′-[(2-cyanoethyl)-(N,N-diisopropyl)]-phosphoramidite, 5′-(4,4′-Dimethoxytrityl)-N-acetyl-2′,3′-seco-cytosine, 2′-benzoyl-3′-[(2-cyanoethyl)-(N,N-diiso-propyl)]-phosphoramidite, 5′-(4,4′-Dimethoxytrityl)-N-isobutyryl-2′,3′-seco-guanosine, 2′-benzoyl-3′-[(2-cyanoethyl)-(N,N-diisopropyl)]-phosphoramidite, and 5′-(4,4′-Dimethoxy-trityl)-2′,3′-seco-uridine, 2′-benzoyl-3′-[(2-cyanoethyl)-(N,N-diiso-propyl)]-phosphoramidite. TFA aminolink phosphoramidites were also commercially purchased (ThermoFisher). Linker L6 was purchased as propargyl-PEG5-NHS from BroadPharm (catalog #BP-20907) and coupled to the NH2-C6 group from an aminolink phosphoramidite to form -L6-C6-, using standard coupling conditions. The linker Alk-cyHex was similarly commercially purchased from Lumiprobe (alkyne phosphoramidite, 5′-terminal) as a propargyl-containing compound phosphoramidite compound to form the linker -Alk-cyHex-. In each case, phosphorothioate linkages were introduced as specified using the conditions set forth herein. The cyclopropyl phosphonate phosphoramidites were synthesized in accordance with International Patent Application Publication No. WO 2017/214112 (see also Altenhofer et. al., Chem. Communications (Royal Soc. Chem.), 57(55):6808-6811 (July 2021)). The (NAG37)s targeting ligand phosphoramidite compounds used in synthesizing the RNAi agents disclosed herein for performing certain SEAP studies described below were synthesized in accordance with International Patent Application Publication No. WO 2018/044350 to Arrowhead Pharmaceuticals, Inc.; the targeting ligand-containing phosphoramidite compounds were added during the solid phase oligonucleotide synthesis process described herein.

[0363] Tri-alkyne-containing phosphoramidites were dissolved in anhydrous dichloromethane or anhydrous acetonitrile (50 mM), while all other amidites were dissolved in anhydrous acetonitrile (50 mM) and molecular sieves (3 Å) were added. 5-Benzylthio-1H-tetrazole (BTT, 250 mM in acetonitrile) or 5-Ethylthio-1H-tetrazole (ETT, 250 mM in acetonitrile) was used as activator solution. Coupling times were 10 minutes (RNA), 90 seconds (2′ O-Me), and 60 seconds (2′ F). In order to introduce phosphorothioate linkages, a 100 mM solution of 3-phenyl 1,2,4-dithiazoline-5-one (POS, obtained from PolyOrg, Inc., Leominster, MA, USA) in anhydrous acetonitrile was employed.

[0364] Alternatively, tri-alkyne moieties were introduced post-synthetically (see section E, below). For this route, the sense strand was functionalized with a 5′ and/or 3′ terminal nucleotide containing a primary amine. TFA aminolink phosphoramidite was dissolved in anhydrous acetonitrile (50 mM) and molecular sieves (3A) were added. 5-Benzylthio-1H-tetrazole (BTT, 250 mM in acetonitrile) or 5-Ethylthio-1H-tetrazole (ETT, 250 mM in acetonitrile) was used as activator solution. Coupling times were 10 minutes (RNA), 90 seconds (2′ O-Me), and 60 seconds (2′ F). In order to introduce phosphorothioate linkages, a 100 mM solution of 3-phenyl 1,2,4-dithiazoline-5-one (POS, obtained from PolyOrg, Inc., Leominster, MA, USA) in anhydrous acetonitrile was employed.

[0365] B. Cleavage and deprotection of support bound oligomer. After finalization of the solid phase synthesis, the dried solid support was treated with a 1:1 volume solution of 40 wt. % methylamine in water and 28% to 31% ammonium hydroxide solution (Aldrich) for 1.5 hours at 30° C. The solution was evaporated and the solid residue was reconstituted in water (see below).

[0366] C. Purification. Crude oligomers were purified by anionic exchange HPLC using a TSKgel SuperQ-5PW 13 μm column and Shimadzu LC-8 system. Buffer A was 20 mM Tris, 5 mM EDTA, pH 9.0 and contained 20% Acetonitrile and buffer B was the same as buffer A with the addition of 1.5 M sodium chloride. UV traces at 260 nm were recorded. Appropriate fractions were pooled then run on size exclusion IIPLC using a GE Healthcare XK 16/40 column packed with Sephadex G-25 fine with a running buffer of 100 mM ammonium bicarbonate, pH 6.7 and 20% Acetonitrile or filtered water. Alternatively, pooled fractions were desalted and exchanged into an appropriate buffer or solvent system via tangential flow filtration.

[0367] D. Annealing. Complementary strands were mixed by combining equimolar RNA solutions (sense and antisense) in 1×PBS (Phosphate-Buffered Saline, 1×, Corning, Cellgro) to form the RNAi agents. Some RNAi agents were lyophilized and stored at −15 to −25° C. Duplex concentration was determined by measuring the solution absorbance on a UV-Vis spectrometer in 1×PBS. The solution absorbance at 260 nm was then multiplied by a conversion factor (0.050 mg/(mL·cm)) and the dilution factor to determine the duplex concentration.

[0368] E. Conjugation of Tri-alkyne linker. In some embodiments a tri-alkyne linker is conjugated to the sense strand of the RNAi agent on resin as a phosphoramidite (see Example 1G for the synthesis of an example tri-alkyne linker phosphoramidite and Example TA for the conjugation of the phosphoramidite.). In other embodiments, a tri-alkyne linker may be conjugated to the sense strand following cleavage from the resin, described as follows: either prior to or after annealing, in some embodiments, the 5′ or 3′ amine functionalized sense strand is conjugated to a tri-alkyne linker. An example tri-alkyne linker structure that can be used in forming the constructs disclosed herein is as follows:

[chemical structure]

To conjugate the tri-alkyne linker to the annealed duplex, amine-functionalized duplex was dissolved in 90% DMSO/10% H₂O, at ˜50-70 mg/mL. 40 equivalents triethylamine was added, followed by 3 equivalents tri-alkyne-PNP. Once complete, the conjugate was precipitated twice in a solvent system of 1× phosphate buffered saline/acetonitrile (1:14 ratio), and dried.

[0369] F. Synthesis of Targeting Ligand SM6.1

### ((S)-3-(4-(4-((14-azido-3,6,9,12-tetraoxatetradecyl)oxy)naphthalen-1-yl)phenyl)-3-(2-(4-((4-methylpyridin-2-yl)amino)butanamido)acetamido)propanoic acid)

[chemical structure]

[0370] Compound 5 (tert-Butyl(4-methylpyridin-2-yl)carbamate) (0.501 g, 2.406 mmol, 1 equiv.) was dissolved in DMF (17 mL). To the mixture was added NaH (0.116 mg, 3.01 mmol, 1.25 eq, 60% dispersion in oil) The mixture stirred for 10 min before adding Compound 20 (Ethyl 4-Bromobutyrate (0.745 g, 3.82 mmol, 0.547 mL)) (Sigma 167118). After 3 hours the reaction was quenched with ethanol (18 mL) and concentrated. The concentrate was dissolved in DCM (50 mL) and washed with saturated aq. NaCl solution (1×50 mL), dried over Na₂SO₄, filtered and concentrated. The product was purified on silica column, gradient 0-5% Methanol in DCM.

[chemical structure]

[0371] Compound 21 was dissolved (0.80 g, 2.378 mmol) in 100 mL of Acetone: 0.1 M NaOH [1:1]. The reaction was monitored by TLC (5% ethyl acetate in hexane). The organics were concentrated away, and the residue was acidified to pH 3-4 with 0.3 M Citric Acid (40 mL). The product was extracted with DCM (3×75 mL). The organics were pooled, dried over Na₂SO₄, filtered and concentrated. The product was used without further purification.

[chemical structure]

[0372] To a solution of Compound 22 (1.1 g, 3.95 mmol, 1 equiv.), Compound 45 (595 mg, 4.74 mmol, 1.2 equiv.), and TBTU (1.52 g, 4.74 mmol, 1.2 equiv.) in anhydrous DMF (10 mL) was added diisopropylethylamine (2.06 mL, 11.85 mmol, 3 equiv.) at 0° C. The reaction mixture was warmed to room temperature and stirred 3 hours. The reaction was quenched by saturated NaHCO₃ solution (10 mL). The aqueous phase was extracted with ethyl acetate (3×10 mL) and the organic phase was combined, dried over anhydrous Na₂SO₄, and concentrated. The product was separated by CombiFlash® using silica gel as the stationary phase. LC-MS: calculated [M+H]+ 366.20, found 367.

[chemical structure]

[0373] To a solution of compound 61 (2 g, 8.96 mmol, 1 equiv.), and compound 62 (2.13 mL, 17.93 mmol, 2 equiv.) in anhydrous DMF (10 mL) was added K₂CO₃ (2.48 g, 17.93 mmol, 2 equiv.) at 0° C. The reaction mixture was warmed to room temperature and stirred overnight. The reaction was quenched by water (10 mL). The aqueous phase was extracted with ethyl acetate (3×10 mL) and the organic phase was combined, dried over anhydrous Na₂SO₄, and concentrated. The product was separated by CombiFlash® using silica gel as the stationary phase.

[chemical structure]

[0374] To a solution of compound 60 (1.77 g, 4.84 mmol, 1 equiv.) in THF (5 mL) and H₂O (5 mL) was added lithium hydroxide monohydrate (0.61 g, 14.53 mmol, 3 equiv.) portion-wise at 0° C. The reaction mixture was warmed to room temperature. After stirring at room temperature for 3 hours, the reaction mixture was acidified by HCl (6 N) to pH 3.0. The aqueous phase was extracted with ethyl acetate (3×20 mL) and the organic layer was combined, dried over Na₂SO₄, and concentrated. LC-MS: calculated [M+H]+ 352.18, found 352.

[chemical structure]

[0375] To a solution of compound 63 (1.88 g, 6.0 mmol, 1.0 equiv.) in anhydrous THF (20 mL) was added n-BuLi in hexane (3.6 mL, 9.0 mmol, 1.5 equiv.) drop-wise at −78° C. The reaction was kept at −78° C. for another 1 hour. Triisopropylborate (2.08 mL, 9.0 mmol, 1.5 equiv.) was then added into the mixture at −78° C. The reaction was then warmed up to room temperature and stirred for another 1 hour. The reaction was quenched by saturated NH4Cl solution (20 mL) and the pH was adjusted to 3. The aqueous phase was extracted with EtOAc (3×20 mL) and the organic phase was combined, dried over Na₂SO₄, and concentrated.

[chemical structure]

[0376] Compound 12 (300 mg, 0.837 mmol, 1.0 equiv.), Compound 65 (349 mg, 1.256 mmol, 1.5 equiv.), XPhos Pd G2 (13 mg, 0.0167 mmol, 0.02 equiv.), and K₃PO₄ (355 mg, 1.675 mmol, 2.0 equiv.) were mixed in a round-bottom flask. The flask was sealed with a screw-cap septum, and then evacuated and backfilled with nitrogen (this process was repeated a total of 3 times). Then, THF (8 mL) and water (2 mL) were added via syringe. The mixture was bubbled with nitrogen for 20 min and the reaction was kept at room temperature for overnight. The reaction was quenched with water (10 mL), and the aqueous phase was extracted with ethyl acetate (3×10 mL). The organic phase was dried over Na₂SO₄, concentrated, and purified via CombiFlash® using silica gel as the stationary phase and was eluted with 15% EtOAc in hexane. LC-MS: calculated [M+H]+ 512.24, found 512.56.

[chemical structure]

[0377] Compound 66 (858 mg, 1.677 mmol, 1.0 equiv.) was cooled by ice bath. HCl in dioxane (8.4 mL, 33.54 mmol, 20 equiv.) was added into the flask. The reaction was warmed to room temperature and stirred for another 1 hr. The solvent was removed by rotary evaporator and the product was directly used without further purification. LC-MS: calculated [M+H]+ 412.18, found 412.46.

[chemical structure]

[0378] To a solution of compound 64 (500 mg, 1.423 mmol, 1 equiv.), compound 67 (669 mg, 1.494 mmol, 1.05 equiv.), and TBTU (548 mg, 0.492 mmol, 1.2 equiv.) in anhydrous DMF (15 mL) was added diisopropylethylamine (0.744 mL, 4.268 mmol, 3 equiv.) at 0° C. The reaction mixture was warmed to room temperature and stirred for another 1 hr. The reaction was quenched by saturated NaHCO₃ aqueous solution (10 mL) and the product was extracted with ethyl acetate (3×20 mL). The organic phase was combined, dried over Na₂SO₄, and concentrated. The product was purified by CombiFlash® using silica gel as the stationary phase and was eluted with 3-4% methanol in DCM. The yield was 96.23%. LC-MS: calculated [M+H]+ 745.35, found 746.08.

[chemical structure]

[0379] To a solution of compound 68 (1.02 g, 1.369 mmol, 1 equiv.) in ethyl acetate (10 mL) was added 100% Pd/C (0.15 g, 50% H₂O) at room temperature. The reaction mixture was warmed to room temperature and the reaction was monitored by LC-MS. The reaction was kept at room temperature overnight. The solids were filtered through Celite® and the solvent was removed by rotary evaporator. The product was directly used without further purification. LC-MS: [M+H]+ 655.31, found 655.87.

[chemical structure]

[0380] To a solution of compound 69 (100 mg, 0.152 mmol, 1 equiv.) and azido-PEG₅-OTs (128 mg, 0.305 mmol, 2 equiv.) in anhydrous DMF (2 mL) was added K₂CO₃ (42 mg, 0.305 mmol, 2 equiv.) at 0° C. The reaction mixture was stirred for 6 hours at 80° C. The reaction was quenched by saturated NaHCO₃ solution and the aqueous layer was extracted with ethyl acetate (3×10 mL). The organic phase was combined, dried over Na₂SO₄, and concentrated. LC-MS: calculated [M+H]+ 900.40, found 901.46.

[chemical structure]

[0381] To a solution of compound 72 (59 mg, 0.0656 mmol, 1.0 equiv.) in THF (2 mL) and water (2 mL) was added lithium hydroxide (5 mg, 0.197 mmol, 3.0 equiv.) at room temperature. The mixture was stirred at room temperature for another 1 hr. The pH was adjusted to 3.0 by HCl (6N) and the aqueous phase was extracted with EtOAc (3×10 mL). The organic phase was combined, dried over Na₂SO₄, and concentrated. TFA (0.5 mL) and DCM (0.5 mL) was added into the residue and the mixture was stirred at room temperature for another 3 hr. The solvent was removed by rotary evaporator. LC-MS: calculated [M+H]+ 786.37, found 786.95.

[0382] G. Synthesis of TriAlk 14

[0383] TriAlk14 and (TriAlkl4)s as shown in Table 11, above, may be synthesized using the synthetic route shown below. Compound 14 may be added to the sense strand as a phosphoramidite using standard oligonucleotide synthesis techniques, or compound 22 may be conjugated to the sense strand comprising an amine in an amide coupling reaction.

[chemical structure]

[0384] To a 3-L jacketed reactor was added 500 mL DCM and 4 (75.0 g, 0.16 mol). The internal temperature of the reaction was cooled to 0° C. and TBTU (170.0 g, 0.53 mol) was added. The suspension was then treated with the amine 5 (75.5 g, 0.53 mol) dropwise keeping the internal temperature less than 5° C. The reaction was then treated with DIPEA (72.3 g, 0.56 mol) slowly, keeping the internal temperature less than 5° C. After the addition was complete, the reaction was warmed up to 23° C. over 1 hour, and allowed to stir for 3 hours. A 10% kicker charge of all three reagents were added and allowed to stir an additional 3 hours. The reaction was deemed complete when <1% of 4 remained. The reaction mixture was washed with saturated ammonium chloride solution (2×500 mL) and once with saturated sodium bicarbonate solution (500 mL). The organic layer was then dried over sodium sulfate and concentrated to an oil. The mass of the crude oil was 188 g which contained 72% 6 by QNMR. The crude oil was carried to the next step. Calculated mass for C₄₆H₆₀N₄O₁₁=845.0 m/z.

[chemical structure]

[0385] The 121.2 g of crude oil containing 72 wt % compound 6 (86.0 g, 0.10 mol) was dissolved in DMF (344 mL) and treated with TEA (86 mL, 20 v/v %), keeping the internal temperature below 23° C. The formation of dibenzofulvene (DBF) relative to the consumption of Fmoc-amine 6 was monitored via HPLC method 1 (FIG. 2) and the reaction was complete within 10 hours. To the solution was added glutaric anhydride (12.8 g, 0.11 mol) and the intermediate amine 7 was converted to compound 8 within 2 hours. Upon completion, the DMF and TEA were removed at 30° C. under reduced pressure resulting in 100 g of a crude oil. Due to the high solubility of compound 7 in water, an aqueous workup could not be used, and chromatography is the only way to remove DBF, TMU, and glutaric anhydride. The crude oil (75 g) was purified on a Teledyne ISCO Combi-Flash® purification system in three portions. The crude oil (25 g) was loaded onto a 330 g silica column and eluted from 0-20% methanol/DCM over 30 minutes resulting in 42 g of compound 8 (54% yield over 3 steps). Calculated mass for C₃₆H₅₅N₄O₁₂=736.4 m/z. Found [M+H]=737.0.

[chemical structure]

[0386] Compound 8 (42.0 g, 0.057 mol) was co-stripped with 10 volumes of acetonitrile prior to use to remove any residual methanol from chromatography solvents. The oil was redissolved in DMF (210 mL) and cooled to 0° C. The solution was treated with 4-nitrophenol (8.7 g, 0.063 mL) followed by EDC-hydrochloride (12.0 g, 0.063 mol) and found to reach completion within 10 hours. The solution was cooled to 0° C. and 10 volumes ethyl acetate was added followed by 10 volumes saturated ammonium chloride solution, keeping the internal temperature below 15° C. The layers were allowed to separate and the ethyl acetate layer was washed with brine. The combined aqueous layers were extracted twice with 5 volumes ethyl acetate. The combined organic layers were dried over sodium sulfate and concentrated to an oil. The crude oil (55 g) was purified on a Teledyne ISCO Combi-Flash® purification system in three portions. The crude oil (25 g) was loaded onto a 330 g silica column and eluted from 0-10% methanol/DCM over 30 minutes resulting in 22 g of pure 9 (Compound 22) (50% yield). Calculated mass for C₄₂H₅₉N₅O₁₄=857.4 m/z. Found [M+H]=858.0.

[chemical structure]

[0387] A solution of ester 9 (49.0 g, 57.1 mmol) and 6-amino-1-hexanol (7.36 g, 6.28 mmol) in dichloromethane (3 volumes) was treated with triethylamine (11.56 g, 111.4 mmol) dropwise. The reaction was monitored by observing the disappearance of compound 9 on HPLC Method 1 and was found to be complete in 10 minutes. The crude reaction mixture was diluted with 5 volumes dichloromethane and washed with saturated ammonium chloride (5 volumes) and brine (5 volumes). The organic layer was dried over sodium sulfate and concentrated to an oil. The crude oil was purified on a Teledyne ISCO Combi-Flash® purification system using a 330 g silica column. The 4-nitrophenol was eluted with 100% ethyl acetate and 10 was flushed from the column using 20% methanol/DCM resulting in a colorless oil (39 g, 81% yield). Calculated mass for C₄₂H₆₉N₅O₁₂=836.0 m/z. Found [M+H]=837.0.

[chemical structure]

[0388] Alcohol 10 was co-stripped twice with 10 volumes of acetonitrile to remove any residual methanol from chromatography solvents and once more with dry dichloromethane (KF <60 ppm) to remove trace water. The alcohol 10 (2.30 g, 2.8 mmol) was dissolved in 5 volumes dry dichloromethane (KF<50 ppm) and treated with diisopropylammonium tetrazolide (188 mg, 1.1 mmol). The solution was cooled to 0° C. and treated with 2-cyanoethyl N,N,N′,N′-tetraisopropylphosphoramidite (1.00 g, 3.3 mmol) dropwise. The solution was removed from ice-bath and stirred at 20° C. The reaction was found to be complete within 3-6 hours. The reaction mixture was cooled to 0° C. and treated with 10 volumes of a 1:1 solution of saturated ammonium bicarbonate/brine and then warmed to ambient over 1 minute and allowed to stir an additional 3 minutes at 20° C. The biphasic mixture was transferred to a separatory funnel and 10 volumes of dichloromethane was added. The organic layer was separated and washed with 10 volumes of saturated sodium bicarbonate solution to hydrolyze unreacted bis-phosphorous reagent. The organic layer was dried over sodium sulfate and concentrated to an oil resulting in 3.08 g of 94 wt % Compound 14. Calculated mass for C₅₁H₈₆N₇O₁₃P=1035.6 m/z. Found [M+H]=1036.

[0389] H. Conjugation of Targeting Ligands. Either prior to or after annealing, the 5′ or 3′ tridentate alkyne functionalized sense strand is conjugated to targeting ligands. The following example describes the conjugation of targeting ligands to the annealed duplex: Stock solutions of 0.5M Tris(3-hydroxypropyltriazolylmethyl)amine (THPTA), 0.5M of Cu(II) sulfate pentahydrate (Cu(II)SO₄·5H₂O) and 2M solution of sodium ascorbate were prepared in deionized water. A 75 mg/mL solution in DMSO of targeting ligand was made. In a 1.5 mL centrifuge tube containing tri-alkyne functionalized duplex (3 mg, 75 μL, 40 mg/mL in deionized water, ˜15,000 g/mol), 25 μL of 1M Hepes pH 8.5 buffer is added. After vortexing, 35 μL of DMSO was added and the solution is vortexed. Targeting ligand was added to the reaction (6 equivalents/duplex, 2 equivalents/alkyne, ˜15 μL) and the solution is vortexed. Using pH paper, pH was checked and confirmed to be pH ˜8. In a separate 1.5 mL centrifuge tube, 50 μL of 0.5M THPTA was mixed with 10 uL of 0.5M Cu(II)SO₄·5H₂O, vortexed, and incubated at room temp for 5 min. After 5 min, THPTA/Cu solution (7.2 μL, 6 equivalents 5:1 THPTA:Cu) was added to the reaction vial, and vortexed. Immediately afterwards, 2M ascorbate (5 μL, 50 equivalents per duplex, 16.7 per alkyne) was added to the reaction vial and vortexed. Once the reaction was complete (typically complete in 0.5-1 h), the reaction was immediately purified by non-denaturing anion exchange chromatography.

### Example 2. SARS-CoV-2-SEAP Mouse Model

[0390] To assess the potency of the RNAi agents, a SARS-CoV-2-SEAP mouse model was used. Six to eight week old female C57BL/6 albino mice were transiently transfected in vivo with plasmid by hydrodynamic tail vein injection, administered at least 15 days prior to administration of an CoV RNAi agent or control. The plasmid contains segments of the SARS-CoV-2 genome sequence (GenBank NC_045512.2 (SEQ ID NO: 1)) inserted into the 3′ UTR of the SEAP (secreted human placental alkaline phosphatase) reporter gene. 10 μg to 50 μg of the plasmid containing the SARS-CoV-2 genome sequence in Ringer's Solution in a total volume of 10% of the animal's body weight was injected into mice via the tail vein to create SARS-CoV-2-SEAP model mice. The solution was injected through a 27-gauge needle in 5-7 seconds as previously described (Zhang G et al., “High levels of foreign gene expression in hepatocytes after tail vein injection of naked plasmid DNA.” Human Gene Therapy 1999 Vol. 10, p 1735-1737.). Inhibition of expression of SARS-CoV-2 sequences by a CoV RNAi agent results in concomitant inhibition of SEAP expression, which is measured by the Phospha-Light™ SEAP Reporter Gene Assay System (Invitrogen). Prior to treatment, SEAP expression levels in serum were measured and the mice were grouped according to average SEAP levels.

[0391] Analyses: SEAP levels may be measured at various times, both before and after administration of CoV RNAi agents.
[0392] i) Serum collection: Mice were anesthetized with 2-3% isoflurane and blood samples were collected from the submandibular area into serum separation tubes (Sarstedt AG & Co., Nümbrecht, Germany). Blood was allowed to coagulate at ambient temperature for 20 min. The tubes were centrifuged at 8,000×g for 3 min to separate the serum and stored at 4° C.
[0393] ii) Serum SEAP levels: Serum was collected and measured by the Phospha-Light™ SEAP Reporter Gene Assay System (Invitrogen) according to the manufacturer's instructions. Serum SEAP levels for each animal was normalized to the control group of mice injected with saline in order to account for the non-treatment related decline in SARS-CoV-2 sequence expression with this model. First, the SEAP level for each animal at a time point was divided by the pre-treatment level of expression in that animal (“pre-treatment”) in order to determine the ratio of expression “normalized to pre-treatment”. Expression at a specific time point was then normalized to the control group by dividing the “normalized to pre-treatment” ratio for an individual animal by the average “normalized to pre-treatment” ratio of all mice in the normal saline control group. Alternatively, in some Examples set forth herein, the serum SEAP levels for each animal were assessed by normalizing to pre-treatment levels only.

### Example 3. In Vivo Testing of CoV RNAi Agents in SARS-CoV-2-SEAP Mice

[0394] The SARS-CoV-2-SEAP mouse model described in Example 2, above, was used. At day 1, four (n=4) female C57bl/6 albino mice were given a single subcutaneous (SQ) injection of 200 μl per 20 g body weight containing either 2.0 mg/kg (mpk) of an CoV RNAi agent or saline without an CoV RNAi agent to be used as a control, according to the following Table 12.

TABLE 12
CoV RNAi agent and Dosing for Example 3

| Group ID | Dosing Regimen |
|---|---|
| Group 1 (isotonic saline) | Single SQ injection on day 1 |
| Group 2 (2.0 mg/kg AD10297) | Single SQ injection on day 1 |
| Group 3 (2.0 mg/kg AD10295) | Single SQ injection on day 1 |
| Group 4 (2.0 mg/kg AD10293) | Single SQ injection on day 1 |
| Group 5 (2.0 mg/kg AD10294) | Single SQ injection on day 1 |
| Group 6 (2.0 mg/kg AD10536) | Single SQ injection on day 1 |
| Group 7 (2.0 mg/kg AD10537) | Single SQ injection on day 1 |
| Group 8 (2.0 mg/kg AD10538) | Single SQ injection on day 1 |
| Group 9 (2.0 mg/kg AD10539) | Single SQ injection on day 1 |
| Group 10 (2.0 mg/kg AD10540) | Single SQ injection on day 1 |
| Group 11 (2.0 mg/kg AD10296) | Single SQ injection on day 1 |

[0395] Each of the CoV RNAi agents included N-acetyl-galactosamine targeting ligands ((NAG37)s) conjugated to the 5′-terminal end of the sense strand, as shown in Tables 5, 7A, and 11 and were added as phosphoramidite compounds during the oligonucleotide synthesis process described above in Example 1.

[0396] The injections were performed between the skin and muscle (i.e. subcutaneous injections) into the loose skin over the neck and shoulder area. Four (4) mice in each group were tested (n=4). Serum was collected on day 8, day 15, day 22, and day 29, and SEAP expression levels were determined pursuant to the procedure set forth in Example 2, above. Data from the experiment are shown in the following Table 13, with Average SEAP reflecting the normalized average value of SEAP.

TABLE 13
Average SEAP normalized to pre-treatment and saline
control in SARS-CoV-2-SEAP mice from Example 3.

| | Day 8 | | Day 15 | |
|---|---|---|---|---|
| | Avg | Std Dev | Avg | Std Dev |
| Group ID | SEAP | (+/−) | SEAP | (+/−) |
| Group 1 (isotonic saline) | 1.000 | 0.156 | 1.000 | 0.143 |
| Group 2 (2.0 mg/kg AD10297) | 0.375 | 0.067 | 0.233 | 0.037 |
| Group 3 (2.0 mg/kg AD10295) | 0.416 | 0.193 | 0.295 | 0.111 |
| Group 4 (2.0 mg/kg AD10293) | 0.497 | 0.161 | 0.420 | 0.092 |
| Group 5 (2.0 mg/kg AD10294) | 0.461 | 0.099 | 0.395 | 0.142 |
| Group 6 (2.0 mg/kg AD10536) | 0.458 | 0.173 | 0.358 | 0.133 |
| Group 7 (2.0 mg/kg AD10537) | 0.385 | 0.087 | 0.229 | 0.039 |
| Group 8 (2.0 mg/kg AD10538) | 0.403 | 0.095 | 0.296 | 0.065 |
| Group 9 (2.0 mg/kg AD10539) | 0.436 | 0.015 | 0.313 | 0.081 |
| Group 10 (2.0 mg/kg AD10540) | 0.397 | 0.102 | 0.240 | 0.071 |
| Group 11 (2.0 mg/kg AD10296) | 0.378 | 0.089 | 0.270 | 0.079 |
| | Day 22 | | Day 29 | |
| | Avg | Std Dev | Avg | Std Dev |
| Group ID | SEAP | (+/−) | SEAP | (+/−) |
| Group 1 (isotonic saline) | 1.000 | 0.233 | 1.000 | 0.206 |
| Group 2 (2.0 mg/kg AD10297) | 0.235 | 0.072 | 0.365 | 0.133 |
| Group 3 (2.0 mg/kg AD10295) | 0.355 | 0.240 | 0.421 | 0.220 |
| Group 4 (2.0 mg/kg AD10293) | 0.508 | 0.164 | 0.770 | 0.184 |
| Group 5 (2.0 mg/kg AD10294) | 0.480 | 0.181 | 0.713 | 0.273 |
| Group 6 (2.0 mg/kg AD10536) | 0.402 | 0.152 | 0.473 | 0.207 |
| Group 7 (2.0 mg/kg AD10537) | 0.228 | 0.045 | 0.324 | 0.072 |
| Group 8 (2.0 mg/kg AD10538) | 0.273 | 0.070 | 0.437 | 0.163 |
| Group 9 (2.0 mg/kg AD10539) | 0.378 | 0.129 | 0.593 | 0.310 |
| Group 10 (2.0 mg/kg AD10540) | 0.263 | 0.088 | 0.378 | 0.113 |
| Group 11 (2.0 mg/kg AD10296) | 0.279 | 0.122 | 0.341 | 0.146 |

[0397] Each of the CoV RNAi agents in each of the dosing groups (i.e., Groups 2 through 11) showed reduction in SEAP as compared to the saline control (Group 1) across all measured time points, which as described herein, indicates inhibition of SARS-CoV-2 RNA in the SARS-CoV-2-SEAP mouse model. For example, at Day 22 the CoV RNAi agent of Group 7 (AD10537) showed reductions in SEAP of approximately 770 (0.228).

### Example 4. In Vivo testing of CoV RNAi agents in SARS-CoV-2-SEAP Mice

[0398] The SARS-CoV-2-SEAP mouse model described in Example 2, above, was used. At day 1. four (n=4) female C57bl/6 albino mice were given a single subcutaneous (SQ) injection of 200 per 20 g body weight containing either 2.0 mg/kg (mpk) of an CoV RNAi agent or saline without an CoV RNAi agent to be used as a control, according to the following Table 14.

TABLE 14
CoV RNAi agent and Dosing for Example 4

| Group ID | Dosing Regimen |
|---|---|
| Group 1 (isotonic saline) | Single SQ injection on day 1 |
| Group 2 (2.0 mg/kg AD10297) | Single SQ injection on day 1 |
| Group 3 (2.0 mg/kg AD10912) | Single SQ injection on day 1 |
| Group 4 (2.0 mg/kg AD10913) | Single SQ injection on day 1 |
| Group 5 (2.0 mg/kg AD10914) | Single SQ injection on day 1 |
| Group 6 (2.0 mg/kg AD10915) | Single SQ injection on day 1 |
| Group 7 (2.0 mg/kg AD10916) | Single SQ injection on day 1 |
| Group 8 (2.0 mg/kg AD10917) | Single SQ injection on day 1 |
| Group 9 (2.0 mg/kg AD10918) | Single SQ injection on day 1 |
| Group 10 (2.0 mg/kg AD10536) | Single SQ injection on day 1 |
| Group 11 (2.0 mg/kg AD10919) | Single SQ injection on day 1 |
| Group 12 (2.0 mg/kg AD10920) | Single SQ injection on day 1 |
| Group 13 (2.0 mg/kg AD10921) | Single SQ injection on day 1 |
| Group 14 (2.0 mg/kg AD10922) | Single SQ injection on day 1 |
| Group 15 (2.0 mg/kg AD10923) | Single SQ injection on day 1 |
| Group 16 (2.0 mg/kg AD10540) | Single SQ injection on day 1 |
| Group 17 (2.0 mg/kg AD10925) | Single SQ injection on day 1 |
| Group 18 (2.0 mg/kg AD10926) | Single SQ injection on day 1 |
| Group 19 (2.0 mg/kg AD10927) | Single SQ injection on day 1 |
| Group 20 (2.0 mg/kg AD10928) | Single SQ injection on day 1 |
| Group 21 (2.0 mg/kg AD10929) | Single SQ injection on day 1 |
| Group 22 (2.0 mg/kg AD10930) | Single SQ injection on day 1 |
| Group 23 (2.0 mg/kg AD10931) | Single SQ injection on day 1 |

[0399] Each of the CoV RNAi agents included N-acetyl-galactosamine targeting ligands ((NAG37)s) conjugated to the 5′-terminal end of the sense strand, as shown in Tables 5, 7A, and 11 and were added as phosphoramidite compounds during the oligonucleotide synthesis process described above in Example 1.

[0400] The injections were performed between the skin and muscle (i.e. subcutaneous injections) into the loose skin over the neck and shoulder area. Four (4) mice in each group were tested (n=4). Serum was collected on day 8, day 15, day 22, and day 29, and SEAP expression levels were determined pursuant to the procedure set forth in Example 2, above. Data from the experiment are shown in the following Table 15, with Average SEAP reflecting the normalized average value of SEAP.

TABLE 15
Average SEAP normalized to pre-treatment and saline
control in SARS-CoV-2-SEAP mice from Example 4.

| | Day 8 | | Day 15 | |
|---|---|---|---|---|
| | Avg | Std Dev | Avg | Std Dev |
| Group ID | SEAP | (+/−) | SEAP | (+/−) |
| Group 1 (isotonic saline) | 1.000 | 0.205 | 1.000 | 0.183 |
| Group 2 (2.0 mg/kg AD10297) | 0.204 | 0.035 | 0.177 | 0.096 |
| Group 3 (2.0 mg/kg AD10912) | 0.193 | 0.020 | 0.151 | 0.039 |
| Group 4 (2.0 mg/kg AD10913) | 0.145 | 0.021 | 0.104 | 0.045 |
| Group 5 (2.0 mg/kg AD10914) | 0.164 | 0.043 | 0.100 | 0.045 |
| Group 6 (2.0 mg/kg AD10915) | 0.218 | 0.059 | 0.209 | 0.048 |
| Group 7 (2.0 mg/kg AD10916) | 0.184 | 0.029 | 0.141 | 0.030 |
| Group 8 (2.0 mg/kg AD10917) | 0.165 | 0.041 | 0.115 | 0.018 |
| Group 9 (2.0 mg/kg AD10918) | 0.137 | 0.021 | 0.076 | 0.025 |
| Group 10 (2.0 mg/kg AD10536) | 0.222 | 0.065 | 0.113 | 0.050 |
| Group 11 (2.0 mg/kg AD10919) | 0.194 | 0.060 | 0.124 | 0.015 |
| Group 12 (2.0 mg/kg AD10920) | 0.175 | 0.048 | 0.118 | 0.022 |
| Group 13 (2.0 mg/kg AD10921) | 0.174 | 0.029 | 0.066 | 0.032 |
| Group 14 (2.0 mg/kg AD10922) | 0.180 | 0.031 | 0.091 | 0.041 |
| Group 15 (2.0 mg/kg AD10923) | 0.147 | 0.040 | 0.150 | 0.070 |
| Group 16 (2.0 mg/kg AD10540) | 0.125 | 0.017 | 0.110 | 0.036 |
| Group 17 (2.0 mg/kg AD10925) | 0.228 | 0.063 | 0.192 | 0.044 |
| Group 18 (2.0 mg/kg AD10926) | 0.315 | 0.146 | 0.243 | 0.110 |
| Group 19 (2.0 mg/kg AD10927) | 0.293 | 0.022 | 0.221 | 0.070 |
| Group 20 (2.0 mg/kg AD10928) | 0.320 | 0.038 | 0.272 | 0.107 |
| Group 21 (2.0 mg/kg AD10929) | 0.428 | 0.035 | 0.301 | 0.070 |
| Group 22 (2.0 mg/kg AD10930) | 0.332 | 0.017 | 0.273 | 0.133 |
| Group 23 (2.0 mg/kg AD10931) | 0.248 | 0.069 | 0.229 | 0.026 |
| | Day 22 | | Day 29 | |
| | Avg | Std Dev | Avg | Std Dev |
| Group ID | SEAP | (+/−) | SEAP | (+/−) |
| Group 1 (isotonic saline) | 1.000 | 0.162 | 1.000 | 0.104 |
| Group 2 (2.0 mg/kg AD10297) | 0.149 | 0.061 | 0.177 | 0.016 |
| Group 3 (2.0 mg/kg AD10912) | 0.163 | 0.077 | 0.182 | 0.160 |
| Group 4 (2.0 mg/kg AD10913) | 0.067 | 0.025 | 0.077 | 0.022 |
| Group 5 (2.0 mg/kg AD10914) | 0.032 | 0.004 | 0.036 | 0.018 |
| Group 6 (2.0 mg/kg AD10915) | 0.126 | 0.022 | 0.146 | 0.030 |
| Group 7 (2.0 mg/kg AD10916) | 0.098 | 0.025 | 0.116 | 0.007 |
| Group 8 (2.0 mg/kg AD10917) | 0.050 | 0.022 | 0.073 | 0.023 |
| Group 9 (2.0 mg/kg AD10918) | 0.064 | 0.023 | 0.073 | 0.035 |
| Group 10 (2.0 mg/kg AD10536) | 0.123 | N/A | 0.153 | N/A |
| Group 11 (2.0 mg/kg AD10919) | 0.112 | N/A | 0.057 | 0.049 |
| Group 12 (2.0 mg/kg AD10920) | 0.073 | 0.003 | 0.048 | 0.003 |
| Group 13 (2.0 mg/kg AD10921) | 0.072 | 0.045 | 0.024 | 0.019 |
| Group 14 (2.0 mg/kg AD10922) | 0.170 | 0.105 | 0.055 | 0.040 |
| Group 15 (2.0 mg/kg AD10923) | 0.115 | 0.065 | 0.047 | 0.014 |
| Group 16 (2.0 mg/kg AD10540) | 0.084 | 0.044 | 0.059 | 0.017 |
| Group 17 (2.0 mg/kg AD10925) | 0.181 | 0.075 | 0.203 | 0.101 |
| Group 18 (2.0 mg/kg AD10926) | 0.301 | 0.091 | 0.254 | 0.062 |
| Group 19 (2.0 mg/kg AD10927) | 0.192 | 0.064 | 0.181 | 0.084 |
| Group 20 (2.0 mg/kg AD10928) | 0.249 | 0.062 | 0.238 | 0.079 |
| Group 21 (2.0 mg/kg AD10929) | 0.314 | 0.069 | 0.272 | 0.083 |
| Group 22 (2.0 mg/kg AD10930) | 0.215 | 0.066 | 0.249 | 0.118 |
| Group 23 (2.0 mg/kg AD10931) | 0.181 | 0.026 | 0.153 | 0.039 |

[0401] Groups 2-23 showed reduction in SEAP as compared to the saline control (Group 1) across all measured time points, which as described herein, indicates inhibition of SARS-CoV-2 RNA in the SARS-CoV-2-SEAP mouse model.

### Example 5. In Vivo Testing of CoV RNAi Agents in SARS-CoV-2-SEAP Mice

[0402] The SARS-CoV-2-SEAP mouse model described in Example 2, above, was used. At day 1, four (n=4) female C57bl/6 albino mice were given a single subcutaneous (SQ) injection of 200 d per 20 g body weight containing either 2.0 mg/kg (mpk) of an CoV RNAi agent or saline without an CoV RNAi agent to be used as a control, according to the following Table 16.

TABLE 16
CoV RNAi agent and Dosing for Example 5

| Group ID | Dosing Regimen |
|---|---|
| Group 1 (isotonic saline) | Single SQ injection on day 1 |
| Group 2 (2.0 mg/kg AD10536) | Single SQ injection on day 1 |
| Group 3 (2.0 mg/kg AD10538) | Single SQ injection on day 1 |
| Group 4 (2.0 mg/kg AD11101) | Single SQ injection on day 1 |
| Group 5 (2.0 mg/kg AD11102) | Single SQ injection on day 1 |
| Group 6 (2.0 mg/kg AD11103) | Single SQ injection on day 1 |
| Group 7 (2.0 mg/kg AD11104) | Single SQ injection on day 1 |
| Group 8 (2.0 mg/kg AD11105) | Single SQ injection on day 1 |
| Group 9 (2.0 mg/kg AD11106) | Single SQ injection on day 1 |
| Group 10 (2.0 mg/kg AD11107) | Single SQ injection on day 1 |
| Group 11 (2.0 mg/kg AD11108) | Single SQ injection on day 1 |
| Group 12 (2.0 mg/kg AD11109) | Single SQ injection on day 1 |
| Group 13 (2.0 mg/kg AD11110) | Single SQ injection on day 1 |
| Group 14 (2.0 mg/kg AD11111) | Single SQ injection on day 1 |
| Group 15 (2.0 mg/kg AD11112) | Single SQ injection on day 1 |
| Group 16 (2.0 mg/kg AD11113) | Single SQ injection on day 1 |
| Group 17 (2.0 mg/kg AD11114) | Single SQ injection on day 1 |
| Group 18 (2.0 mg/kg AD11115) | Single SQ injection on day 1 |
| Group 19 (2.0 mg/kg AD11116) | Single SQ injection on day 1 |
| Group 20 (2.0 mg/kg AD10296) | Single SQ injection on day 1 |
| Group 21 (2.0 mg/kg AD11117) | Single SQ injection on day 1 |
| Group 22 (2.0 mg/kg AD11118) | Single SQ injection on day 1 |
| Group 23 (2.0 mg/kg AD11119) | Single SQ injection on day 1 |
| Group 24 (2.0 mg/kg AD11120) | Single SQ injection on day 1 |

[0403] Each of the CoV RNAi agents included N-acetyl-galactosamine targeting ligands ((NAG37)s) conjugated to the 5′-terminal end of the sense strand, as shown in Tables 5, 7A, and 11 and were added as phosphoramidite compounds during the oligonucleotide synthesis process described above in Example 1.

[0404] The injections were performed between the skin and muscle (i.e. subcutaneous injections) into the loose skin over the neck and shoulder area. Four (4) mice in each group were tested (n=4). Serum was collected on day 8, day 15, day 22, and day 29, and SEAP expression levels were determined pursuant to the procedure set forth in Example 2, above. Data from the experiment are shown in the following Table 17, with Average SEAP reflecting the normalized average value of SEAP:

TABLE 17
Average SEAP normalized to pre-treatment and saline
control in SARS-CoV-2-SEAP mice from Example 5.

| | Day 8 | | Day 15 | |
|---|---|---|---|---|
| | Avg | Std Dev | Avg | Std Dev |
| Group ID | SEAP | (+/−) | SEAP | (+/−) |
| Group 1 (isotonic saline) | 1.000 | 0.184 | 1.000 | 0.259 |
| Group 2 (2.0 mg/kg AD10536) | 0.345 | 0.111 | 0.286 | 0.104 |
| Group 3 (2.0 mg/kg AD10538) | 0.353 | 0.250 | 0.290 | 0.117 |
| Group 4 (2.0 mg/kg AD11101) | 0.219 | 0.135 | 0.153 | 0.074 |
| Group 5 (2.0 mg/kg AD11102) | 0.224 | 0.080 | 0.145 | 0.023 |
| Group 6 (2.0 mg/kg AD11103) | 0.231 | 0.043 | 0.161 | 0.033 |
| Group 7 (2.0 mg/kg AD11104) | 0.266 | 0.056 | 0.178 | 0.055 |
| Group 8 (2.0 mg/kg AD11105) | 0.227 | 0.032 | 0.104 | 0.042 |
| Group 9 (2.0 mg/kg AD11106) | 0.263 | 0.058 | 0.111 | 0.046 |
| Group 10 (2.0 mg/kg AD11107) | 0.234 | 0.030 | 0.122 | 0.004 |
| Group 11 (2.0 mg/kg AD11108) | 0.349 | 0.100 | 0.286 | 0.051 |
| Group 12 (2.0 mg/kg AD11109) | 0.200 | 0.030 | 0.143 | 0.017 |
| Group 13 (2.0 mg/kg AD11110) | 0.175 | 0.027 | 0.053 | 0.012 |
| Group 14 (2.0 mg/kg AD11111) | 0.220 | 0.013 | 0.089 | 0.013 |
| Group 15 (2.0 mg/kg AD11112) | 0.223 | 0.051 | 0.076 | 0.023 |
| Group 16 (2.0 mg/kg AD11113) | 0.196 | 0.035 | 0.134 | 0.041 |
| Group 17 (2.0 mg/kg AD11114) | 0.598 | 0.197 | 0.311 | 0.065 |
| Group 18 (2.0 mg/kg AD11115) | 0.555 | 0.029 | 0.334 | 0.031 |
| Group 19 (2.0 mg/kg AD11116) | 0.335 | 0.062 | 0.159 | 0.053 |
| Group 20 (2.0 mg/kg AD10296) | 0.451 | 0.145 | 0.242 | 0.051 |
| Group 21 (2.0 mg/kg AD11117) | 0.234 | 0.039 | 0.234 | 0.054 |
| Group 22 (2.0 mg/kg AD11118) | 0.225 | 0.078 | 0.105 | 0.040 |
| Group 23 (2.0 mg/kg AD11119) | 0.978 | 0.268 | 0.726 | 0.219 |
| Group 24 (2.0 mg/kg AD11120) | 1.118 | 0.201 | 0.804 | 0.336 |
| | Day 22 | | Day 29 | |
| | Avg | Std Dev | Avg | Std Dev |
| Group ID | SEAP | (+/−) | SEAP | (+/−) |
| Group 1 (isotonic saline) | 1.000 | 0.228 | 1.000 | 0.923 |
| Group 2 (2.0 mg/kg AD10536) | 0.319 | 0.128 | 0.397 | 0.098 |
| Group 3 (2.0 mg/kg AD10538) | 0.353 | 0.106 | 0.328 | 0.056 |
| Group 4 (2.0 mg/kg AD11101) | 0.226 | 0.039 | 0.219 | 0.082 |
| Group 5 (2.0 mg/kg AD11102) | 0.148 | 0.045 | 0.192 | 0.091 |
| Group 6 (2.0 mg/kg AD11103) | 0.167 | 0.064 | 0.185 | 0.111 |
| Group 7 (2.0 mg/kg AD11104) | 0.171 | 0.046 | 0.189 | 0.090 |
| Group 8 (2.0 mg/kg AD11105) | 0.098 | 0.054 | 0.137 | 0.079 |
| Group 9 (2.0 mg/kg AD11106) | 0.110 | 0.069 | 0.122 | 0.040 |
| Group 10 (2.0 mg/kg AD11107) | 0.118 | 0.009 | 0.089 | 0.047 |
| Group 11 (2.0 mg/kg AD11108) | 0.333 | 0.078 | 0.445 | 0.147 |
| Group 12 (2.0 mg/kg AD11109) | 0.168 | 0.020 | 0.285 | 0.235 |
| Group 13 (2.0 mg/kg AD11110) | 0.092 | 0.032 | 0.095 | 0.030 |
| Group 14 (2.0 mg/kg AD11111) | 0.192 | 0.025 | 0.124 | 0.027 |
| Group 15 (2.0 mg/kg AD11112) | 0.104 | 0.019 | 0.115 | 0.034 |
| Group 16 (2.0 mg/kg AD11113) | 0.202 | 0.090 | 0.132 | 0.060 |
| Group 17 (2.0 mg/kg AD11114) | 0.389 | 0.099 | 0.196 | 0.056 |
| Group 18 (2.0 mg/kg AD11115) | 0.448 | 0.088 | 0.261 | 0.036 |
| Group 19 (2.0 mg/kg AD11116) | 0.149 | 0.085 | 0.149 | 0.094 |
| Group 20 (2.0 mg/kg AD10296) | 0.369 | 0.107 | 0.243 | 0.068 |
| Group 21 (2.0 mg/kg AD11117) | 0.235 | 0.126 | 0.216 | 0.057 |
| Group 22 (2.0 mg/kg AD11118) | 0.122 | 0.054 | 0.135 | 0.067 |
| Group 23 (2.0 mg/kg AD11119) | 0.990 | 0.344 | 0.517 | 0.192 |
| Group 24 (2.0 mg/kg AD11120) | 0.831 | 0.251 | 0.487 | 0.198 |

[0405] Groups 2-22 showed reductions in SEAP as compared to the saline control (Group 1), which as described herein, indicates inhibition of SARS-CoV-2 RNA in the SARS-CoV-2-SEAP mouse model.

### Example 6. In Vivo Testing of CoVRNAi Agents in SARS-CoV-2-SEAP Mice

[0406] The SARS-CoV-2-SEAP mouse model described in Example 2, above, was used. At day 1, four (n=4) female C57bl/6 albino mice were given a single subcutaneous (SQ) injection of 250 μl per 25 g body weight containing either 2.0 mg/kg (mpk) of an CoV RNAi agent or saline without an CoV RNAi agent to be used as a control, according to the following Table 18.

TABLE 18
CoV RNAi agent and Dosing for Example 6

| Group ID | Dosing Regimen |
|---|---|
| Group 1 (isotonic saline) | Single SQ injection on day 1 |
| Group 2 (2.0 mg/kg AD10912) | Single SQ injection on day 1 |
| Group 3 (2.0 mg/kg AD11122) | Single SQ injection on day 1 |
| Group 4 (2.0 mg/kg AD11123) | Single SQ injection on day 1 |
| Group 5 (2.0 mg/kg AD11124) | Single SQ injection on day 1 |
| Group 6 (2.0 mg/kg AD11125) | Single SQ injection on day 1 |
| Group 7 (2.0 mg/kg AD11126) | Single SQ injection on day 1 |
| Group 8 (2.0 mg/kg AD11127) | Single SQ injection on day 1 |
| Group 9 (2.0 mg/kg AD11128) | Single SQ injection on day 1 |
| Group 10 (2.0 mg/kg AD11129) | Single SQ injection on day 1 |

[0407] Each of the CoV RNAi agents included N-acetyl-galactosamine targeting ligands ((NAG37)s) conjugated to the 5′-terminal end of the sense strand, as shown in Tables 5, 7A, and 11 and were added as phosphoramidite compounds during the oligonucleotide synthesis process described above in Example 1.

[0408] The injections were performed between the skin and muscle (i.e. subcutaneous injections) into the loose skin over the neck and shoulder area. Four (4) mice in each group were tested (n=4). Serum was collected on day 8, day 15, day 22, and day 29, and SEAP expression levels were determined pursuant to the procedure set forth in Example 2, above. Data from the experiment are shown in the following Table 19, with Average SEAP reflecting the normalized average value of SEAP.

TABLE 19
Average SEAP normalized to pre-treatment and saline
control in SARS-CoV-2-SEAP mice from Example 6.

| | Day 8 | | Day 15 | |
|---|---|---|---|---|
| | Avg | Std Dev | Avg | Std Dev |
| Group ID | SEAP | (+/−) | SEAP | (+/−) |
| Group 1 (isotonic saline) | 1.000 | 0.303 | 1.000 | 0.415 |
| Group 2 (2.0 mg/kg AD10912) | 0.478 | 0.174 | 0.540 | 0.230 |
| Group 3 (2.0 mg/kg AD11122) | 0.208 | 0.069 | 0.142 | 0.035 |
| Group 4 (2.0 mg/kg AD11123) | 0.494 | 0.077 | 0.559 | 0.098 |
| Group 5 (2.0 mg/kg AD11124) | 0.913 | 0.234 | 0.953 | 0.215 |
| Group 6 (2.0 mg/kg AD11125) | 0.351 | 0.084 | 0.398 | 0.085 |
| Group 7 (2.0 mg/kg AD11126) | 0.810 | 0.148 | 0.874 | 0.188 |
| Group 8 (2.0 mg/kg AD11127) | 0.530 | 0.113 | 0.561 | 0.131 |
| Group 9 (2.0 mg/kg AD11128) | 1.152 | 0.279 | 1.126 | 0.342 |
| Group 10 (2.0 mg/kg AD11129) | 0.976 | 0.180 | 1.000 | 0.248 |
| | Day 22 | | Day 29 | |
| | Avg | Std Dev | Avg | Std Dev |
| Group ID | SEAP | (+/−) | SEAP | (+/−) |
| Group 1 (isotonic saline) | 1.000 | 0.459 | 1.000 | 0.539 |
| Group 2 (2.0 mg/kg AD10912) | 0.634 | 0.285 | 0.748 | 0.422 |
| Group 3 (2.0 mg/kg AD11122) | 0.158 | 0.032 | 0.170 | 0.029 |
| Group 4 (2.0 mg/kg AD11123) | 0.531 | 0.096 | 0.657 | 0.183 |
| Group 5 (2.0 mg/kg AD11124) | 0.891 | 0.193 | 1.109 | 0.292 |
| Group 6 (2.0 mg/kg AD11125) | 0.398 | 0.104 | 0.606 | 0.238 |
| Group 7 (2.0 mg/kg AD11126) | 0.901 | 0.181 | 1.047 | 0.121 |
| Group 8 (2.0 mg/kg AD11127) | 0.588 | 0.195 | 0.768 | 0.377 |
| Group 9 (2.0 mg/kg AD11128) | 1.068 | 0.345 | 1.159 | 0.495 |
| Group 10 (2.0 mg/kg AD11129) | 0.960 | 0.310 | 1.236 | 0.715 |

[0409] Groups 2-4, 6, and 8 showed reduction in SEAP as compared to the saline control (Group 1), which as described herein, indicates inhibition of SARS-CoV-2 RNA in the SARS-CoV-2-SEAP mouse model.

### Example 7. In Vivo Testing of CoV RNAi Agents in SARS-Co V-2-SEAP Mice

[0410] The SARS-CoV-2-SEAP mouse model described in Example 2, above, was used. At day 1, four (n=4) female C57bl/6 albino mice were given a single subcutaneous (SQ) injection of 200 μl per 20 g body weight containing either 2.0 mg/kg (mpk), 1.0 mg/kg (mpk) or 0.5 mg/kg (mpk) of an CoV RNAi agent or saline without an CoV RNAi agent to be used as a control, according to the following Table 20.

TABLE 20
CoV RNAi agent and Dosing for Example 7

| Group ID | Dosing Regimen |
|---|---|
| Group 1 (isotonic saline) | Single SQ injection on day 1 |
| Group 2 (1.0 mg/kg AD10297) | Single SQ injection on day 1 |
| Group 3 (2.0 mg/kg AD10914) | Single SQ injection on day 1 |
| Group 4 (1.0 mg/kg AD10914) | Single SQ injection on day 1 |
| Group 5 (0.5 mg/kg AD10914) | Single SQ injection on day 1 |
| Group 6 (1.0 mg/kg AD11610) | Single SQ injection on day 1 |
| Group 7 (1.0 mg/kg AD11611) | Single SQ injection on day 1 |
| Group 8 (1.0 mg/kg AD10538) | Single SQ injection on day 1 |
| Group 9 (1.0 mg/kg AD11105) | Single SQ injection on day 1 |
| Group 10 (1.0 mg/kg AD11612) | Single SQ injection on day 1 |
| Group 11 (1.0 mg/kg AD11118) | Single SQ injection on day 1 |

[0411] Each of the CoV RNAi agents included N-acetyl-galactosamine targeting ligands ((NAG37)s) conjugated to the 5′-terminal end of the sense strand, as shown in Tables 5, 7A, and 11 and were added as phosphoramidite compounds during the oligonucleotide synthesis process described above in Example 1.

[0412] The injections were performed between the skin and muscle (i.e. subcutaneous injections) into the loose skin over the neck and shoulder area. Four (4) mice in each group were tested (n=4). Serum was collected on day 8, day 15, day 22, and day 29, and SEAP expression levels were determined pursuant to the procedure set forth in Example 2, above. Data from the experiment are shown in the following Table 21, with Average SEAP reflecting the normalized average value of SEAP:

TABLE 21
Average SEAP normalized to pre-treatment and saline
control in SARS-CoV-2-SEAP mice from Example 7.

| | Day 8 | | Day 15 | |
|---|---|---|---|---|
| | Avg | Std Dev | Avg | Std Dev |
| Group ID | SEAP | (+/−) | SEAP | (+/−) |
| Group 1 (isotonic saline) | 1.000 | 0.112 | 1.000 | 0.252 |
| Group 2 (1.0 mg/kg AD10297) | 0.533 | 0.109 | 0.420 | 0.230 |
| Group 3 (2.0 mg/kg AD10914) | 0.224 | 0.076 | 0.143 | 0.022 |
| Group 4 (1.0 mg/kg AD10914) | 0.468 | 0.158 | 0.426 | 0.102 |
| Group 5 (0.5 mg/kg AD10914) | 0.558 | 0.229 | 0.397 | 0.205 |
| Group 6 (1.0 mg/kg AD11610) | 0.476 | 0.098 | 0.286 | 0.102 |
| Group 7 (1.0 mg/kg AD11611) | 0.362 | 0.073 | 0.221 | 0.024 |
| Group 8 (1.0 mg/kg AD10538) | 0.600 | 0.147 | 0.526 | 0.151 |
| Group 9 (1.0 mg/kg AD11105) | 0.337 | 0.040 | 0.137 | 0.069 |
| Group 10 (1.0 mg/kg AD11612) | 0.282 | 0.062 | 0.212 | 0.086 |
| Group 11 (1.0 mg/kg AD11118) | 0.401 | 0.083 | 0.324 | 0.100 |
| | Day 22 | | Day 29 | |
| | Avg | Std Dev | Avg | Std Dev |
| Group ID | SEAP | (+/−) | SEAP | (+/−) |
| Group 1 (isotonic saline) | 1.000 | 0.517 | 1.000 | 0.888 |
| Group 2 (1.0 mg/kg AD10297) | 0.576 | 0.188 | 0.505 | 0.177 |
| Group 3 (2.0 mg/kg AD10914) | 0.175 | 0.021 | 0.248 | 0.073 |
| Group 4 (1.0 mg/kg AD10914) | 0.491 | 0.395 | 0.547 | 0.552 |
| Group 5 (0.5 mg/kg AD10914) | 0.490 | 0.189 | 0.444 | 0.225 |
| Group 6 (1.0 mg/kg AD11610) | 0.463 | 0.120 | 0.431 | 0.124 |
| Group 7 (1.0 mg/kg AD11611) | 0.282 | 0.106 | 0.348 | 0.174 |
| Group 8 (1.0 mg/kg AD10538) | 0.521 | 0.248 | 0.410 | 0.128 |
| Group 9 (1.0 mg/kg AD11105) | 0.285 | 0.076 | 0.259 | 0.056 |
| Group 10 (1.0 mg/kg AD11612) | 0.261 | 0.147 | 0.243 | 0.108 |
| Group 11 (1.0 mg/kg AD11118) | 0.410 | 0.157 | 0.535 | 0.235 |

[0413] Groups 2-11 (at all time points) showed reduction in SEAP as compared to the saline control (Group 1), which as described herein, indicates inhibition of SARS-CoV-2 RNA in the SARS-CoV-2-SEAP mouse model.

### Example 8. In Vivo Testing of CoV RNAi Agents in SARS-CoV-2-SEAP Mice

[0414] The SARS-CoV-2-SEAP mouse model described in Example 2, above, was used. At day 1, four (n=4) female C57bl/6 albino mice were given a single subcutaneous (SQ) injection of 250 μl per 25 g body weight containing either 1.0 mg/kg (mpk), 2.0 mg/kg (mpk) or 0.5 mg/kg (mpk) of a CoV RNAi agent or saline without an CoV RNAi agent to be used as a control, according to the following Table 22.

TABLE 22
CoV RNAi agent and Dosing for Example 8

| Group ID | Dosing Regimen |
|---|---|
| Group 1 (isotonic saline) | Single SQ injection on day 1 |
| Group 2 (1.0 mg/kg AD10536) | Single SQ injection on day 1 |
| Group 3 (2.0 mg/kg AD10921) | Single SQ injection on day 1 |
| Group 4 (1.0 mg/kg AD10921) | Single SQ injection on day 1 |
| Group 5 (0.5 mg/kg AD10921) | Single SQ injection on day 1 |
| Group 6 (1.0 mg/kg AD11108) | Single SQ injection on day 1 |
| Group 7 (1.0 mg/kg AD11110) | Single SQ injection on day 1 |
| Group 8 (1.0 mg/kg AD11613) | Single SQ injection on day 1 |
| Group 9 (1.0 mg/kg AD11112) | Single SQ injection on day 1 |
| Group 10 (1.0 mg/kg AD11614) | Single SQ injection on day 1 |
| Group 11 (1.0 mg/kg AD11615) | Single SQ injection on day 1 |
| Group 12 (1.0 mg/kg AD11616) | Single SQ injection on day 1 |

[0415] Each of the CoV RNAi agents included N-acetyl-galactosamine targeting ligands ((NAG37)s) conjugated to the 5′-terminal end of the sense strand, as shown in Tables 5, 7A, and 11 and were added as phosphoramidite compounds during the oligonucleotide synthesis process described above in Example 1.

[0416] The injections were performed between the skin and muscle (i.e. subcutaneous injections) into the loose skin over the neck and shoulder area. Four (4) mice in each group were tested (n=4). Serum was collected on day 8, day 15, day 22, and day 29, and SEAP expression levels were determined pursuant to the procedure set forth in Example 2, above. Data from the experiment are shown in the following Table 23, with Average SEAP reflecting the normalized average value of SEAP.

TABLE 23
Average SEAP normalized to pre-treatment and saline
control in SARS-CoV-2-SEAP mice from Example 8.

| | Day 8 | | Day 15 | |
|---|---|---|---|---|
| | Avg | Std Dev | Avg | Std Dev |
| Group ID | SEAP | (+/−) | SEAP | (+/−) |
| Group 1 (isotonic saline) | 1.000 | 0.248 | 1.000 | 0.266 |
| Group 2 (1.0 mg/kg AD10536) | 0.418 | 0.054 | 0.381 | 0.054 |
| Group 3 (2.0 mg/kg AD10921) | 0.151 | 0.024 | 0.122 | 0.009 |
| Group 4 (1.0 mg/kg AD10921) | 0.236 | 0.076 | 0.124 | 0.073 |
| Group 5 (0.5 mg/kg AD10921) | 0.380 | 0.161 | 0.230 | 0.042 |
| Group 6 (1.0 mg/kg AD11108) | 0.263 | 0.060 | 0.254 | 0.092 |
| Group 7 (1.0 mg/kg AD11110) | 0.218 | 0.057 | 0.128 | 0.041 |
| Group 8 (1.0 mg/kg AD11613) | 0.195 | 0.047 | 0.168 | 0.058 |
| Group 9 (1.0 mg/kg AD11112) | 0.212 | 0.042 | 0.149 | 0.035 |
| Group 10 (1.0 mg/kg AD11614) | 0.196 | 0.059 | 0.140 | 0.062 |
| Group 11 (1.0 mg/kg AD11615) | 0.190 | 0.033 | 0.160 | 0.079 |
| Group 12 (1.0 mg/kg AD11616) | 0.183 | 0.060 | 0.141 | 0.048 |
| | Day 22 | | Day 29 | |
| | Avg | Std Dev | Avg | Std Dev |
| Group ID | SEAP | (+/−) | SEAP | (+/−) |
| Group 1 (isotonic saline) | 1.000 | 0.350 | 1.000 | 0.341 |
| Group 2 (1.0 mg/kg AD10536) | 0.364 | 0.094 | 0.539 | 0.203 |
| Group 3 (2.0 mg/kg AD10921) | 0.121 | 0.027 | 0.172 | 0.083 |
| Group 4 (1.0 mg/kg AD10921) | 0.159 | 0.054 | 0.184 | 0.047 |
| Group 5 (0.5 mg/kg AD10921) | 0.207 | 0.050 | 0.321 | 0.140 |
| Group 6 (1.0 mg/kg AD11108) | 0.301 | 0.160 | 0.512 | 0.352 |
| Group 7 (1.0 mg/kg AD11110) | 0.149 | 0.080 | 0.137 | 0.039 |
| Group 8 (1.0 mg/kg AD11613) | 0.140 | 0.061 | 0.176 | 0.084 |
| Group 9 (1.0 mg/kg AD11112) | 0.170 | 0.048 | 0.178 | 0.027 |
| Group 10 (1.0 mg/kg AD11614) | 0.124 | 0.065 | 0.182 | 0.096 |
| Group 11 (1.0 mg/kg AD11615) | 0.142 | 0.094 | 0.155 | 0.101 |
| Group 12 (1.0 mg/kg AD11616) | 0.171 | 0.068 | 0.286 | 0.265 |

[0417] Each of the CoV RNAi agents in each of the dosing groups (i.e., Groups 2 through 12) showed reduction in SEAP as compared to the saline control (Group 1) across all measured time points, which as described herein, indicates inhibition of SARS-CoV-2 in the SARS-CoV-2-SEAP mouse model.

### Example 9. In Vivo Testing of CoV RNAi Agents in SARS-CoV-2-SEAP Mice

[0418] The SARS-CoV-2-SEAP mouse model described in Example 2, above, was used. At day 1, four (n=4) female C57bl/6 albino mice were given a single subcutaneous (SQ) injection of 200 μl per 20 g body weight containing either 2.0 mg/kg (mpk), 1.0 mg/kg (mpk) or 0.5 mg/kg (mpk) of an CoV RNAi agent or saline without an CoV RNAi agent to be used as a control, according to the following Table 24.

TABLE 24
CoV RNAi agent and Dosing for Example 9

| Group ID | Dosing Regimen |
|---|---|
| Group 1 (isotonic saline) | Single SQ injection on day 1 |
| Group 2 (2.0 mg/kg AD11611) | Single SQ injection on day 1 |
| Group 3 (1.0 mg/kg AD11611) | Single SQ injection on day 1 |
| Group 4 (0.5 mg/kg AD11611) | Single SQ injection on day 1 |
| Group 5 (2.0 mg/kg AD11122) | Single SQ injection on day 1 |
| Group 6 (1.0 mg/kg AD11122) | Single SQ injection on day 1 |
| Group 7 (0.5 mg/kg AD11122) | Single SQ injection on day 1 |
| Group 8 (2.0 mg/kg AD11105) | Single SQ injection on day 1 |
| Group 9 (1.0 mg/kg AD11105) | Single SQ injection on day 1 |
| Group 10 (0.5 mg/kg AD11105) | Single SQ injection on day 1 |

[0419] Each of the CoV RNAi agents included N-acetyl-galactosamine targeting ligands ((NAG37)s) conjugated to the 5′-terminal end of the sense strand, as shown in Tables 5, 7A, and 11 and were added as phosphoramidite compounds during the oligonucleotide synthesis process described above in Example 1.

[0420] These CoV RNAi agents were selected for inclusion in this study based upon data from previous studies that identified each of them as being the most highly potent at inhibiting expression. AD11611 includes an antisense strand nucleotide sequence targeting position 6412 of the SARS-CoV-2 genome; AD11122 includes an antisense strand nucleotide sequence targeting position 4156 of the SARS-CoV-2 genome; and AD11105 includes an antisense strand nucleotide sequence targeting position 29150 of the SARS-CoV-2 genome.

[0421] The injections were performed between the skin and muscle (i.e. subcutaneous injections) into the loose skin over the neck and shoulder area. Four (4) mice in each group were tested (n=4). Serum was collected on day 8, day 15, day 22, and day 29, and SEAP expression levels were determined pursuant to the procedure set forth in Example 2, above. Data from the experiment are shown in the following Table 25, with Average SEAP reflecting the normalized average value of SEAP

TABLE 25
Average SEAP normalized to pre-treatment and saline
control in SARS-CoV-2-SEAP mice from Example 9.

| | Day 8 | | Day 15 | |
|---|---|---|---|---|
| | Avg | Std Dev | Avg | Std Dev |
| Group ID | SEAP | (+/−) | SEAP | (+/−) |
| Group 1 (isotonic saline) | 1.000 | 0.308 | 1.000 | 0.189 |
| Group 2 (2.0 mg/kg AD11611) | 0.243 | 0.081 | 0.213 | 0.088 |
| Group 3 (1.0 mg/kg AD11611) | 0.377 | 0.129 | 0.345 | 0.206 |
| Group 4 (0.5 mg/kg AD11611) | 0.438 | 0.136 | 0.365 | 0.114 |
| Group 5 (2.0 mg/kg AD11122) | 0.246 | 0.097 | 0.147 | 0.080 |
| Group 6 (1.0 mg/kg AD11122) | 0.422 | 0.086 | 0.330 | 0.090 |
| Group 7 (0.5 mg/kg AD11122) | 0.496 | 0.187 | 0.536 | 0.204 |
| Group 8 (2.0 mg/kg AD11105) | 0.238 | 0.043 | 0.164 | 0.050 |
| Group 9 (1.0 mg/kg AD11105) | 0.427 | 0.360 | 0.339 | 0.336 |
| Group 10 (0.5 mg/kg AD11105) | 0.319 | 0.102 | 0.230 | 0.058 |
| | Day 22 | | Day 29 | |
| | Avg | Std Dev | Avg | Std Dev |
| Group ID | SEAP | (+/−) | SEAP | (+/−) |
| Group 1 (isotonic saline) | 1.000 | 0.185 | 1.000 | 0.243 |
| Group 2 (2.0 mg/kg AD11611) | 0.231 | 0.115 | 0.231 | 0.095 |
| Group 3 (1.0 mg/kg AD11611) | 0.382 | 0.112 | 0.343 | 0.109 |
| Group 4 (0.5 mg/kg AD11611) | 0.464 | 0.151 | 0.329 | 0.103 |
| Group 5 (2.0 mg/kg AD11122) | 0.146 | 0.079 | 0.170 | 0.081 |
| Group 6 (1.0 mg/kg AD11122) | 0.409 | 0.121 | 0.483 | 0.179 |
| Group 7 (0.5 mg/kg AD11122) | 0.420 | 0.125 | 0.380 | 0.157 |
| Group 8 (2.0 mg/kg AD11105) | 0.153 | 0.038 | 0.143 | 0.040 |
| Group 9 (1.0 mg/kg AD11105) | 0.335 | 0.340 | 0.262 | 0.266 |
| Group 10 (0.5 mg/kg AD11105) | 0.225 | 0.076 | 0.216 | 0.092 |

[0422] As shown in the tables above, each of the CoV RNAi agents in each of the dosing groups (i.e., Groups 2 through 10) showed substantial reductions in SEAP as compared to the saline control (Group 1) across all measured time points, which as described herein, indicates inhibition of SARS-CoV-2 in the SARS-CoV-2-SEAP mouse model.

### Example 10. Testing of RNAi Triggers in a Hamster Model of SARS-CoV-2 Infection

[0423] To assess the potency of the RNAi agents, a hamster model of SARS-CoV-2 infection was also used. Six to eight week old male Syrian golden hamsters were divided into 9 groups according to Table 26 below. Hamsters were pre-treated with RNAi agent or saline on study days −8 and −6 via intratracheal instillation (IT) prior to SARS-CoV-2 challenge delivered intranasally (IN) on study day 0. Groups were euthanized on either study day 3 or day 7 post SARS-CoV-2 challenge. Group 1 was a control group administered saline on day −8 and day −6 pre-challenge. Groups 2-4 were administered AC001924 and AC001926 individually or in combination on day −8 and day −6 at single 5 mg/kg IT doses and euthanized on study day 3 post-SARS-CoV-2 challenge. Groups 5 and 6 were administered saline on day −8 and day −6 Groups 7-9 were administered AC0001924 and AC001926 individually or in combination on day −8 and day −6 at single 5 mg/kg IT doses and euthanized on study day 7 post-SARS-CoV-2 challenge. For animals receiving a combination of AC0001924 and AC001926, the two RNAi agents were combined, and the dose indicated in Table 26 is the total dose of the two duplexes. AC001924 includes an antisense strand nucleotide sequence targeting position 29150 of the SARS-CoV-2 genome, and AC001926 includes an antisense strand nucleotide sequence targeting position 15886 of the SARS-CoV-2 genome. Intratracheal instillation was administered at a volume of 2 mL/kg based on body weight. For SARS-CoV-2 challenge intranasally, administration of 9×10³ plaque-forming units (PFU) of WA01 isolate was given at a volume of 50 μL volume in each nostril. Body weights were determined daily from day −4 until terminal collection for all groups. At euthanization, left lung lobes were collected, with one half snap frozen for analysis of PFU in tissue homogenate, and one half for viral RNA qPCR. Right lungs were inflated with 10% neutral buffered formalin (NBF), transferred to 70% ethanol, and processed into paraffin blocks for H&E staining.

TABLE 26
Experimental Design

| | | | | Dose | | | |
|---|---|---|---|---|---|---|---|
| | | | | Level per | Treatment | SARS-CoV-2 | Terminal |
| Group | N | Treatment | Route | Treatment | Days | challenge | Collection |
| 1 | 8 | Saline | IT | 0 mg/kg | D -8, D -6 | D 0 | D 3 |
| 2 | 8 | AC001924 | IT | 5 mg/kg | D -8, D -6 | D 0 | D 3 |
| | | (pos 29150) | | | | | |
| 3 | 8 | AC001926 | IT | 5 mg/kg | D -8, D -6 | D 0 | D 3 |
| | | (pos 15886) | | | | | |
| 4 | 8 | AC001924 | IT | 5 mg/kg | D -8, D -6 | D 0 | D 3 |
| | | (pos 29150) + | | | | | |
| | | AC001926 | | | | | |
| | | (pos 15886) | | | | | |
| 5 | 3 | Saline | IT | 0 mg/kg | D -8, D -6 | No challenge | D 7 |
| 6 | 8 | Saline | IT | 0 mg/kg | D -8, D -6 | D 0 | D 7 |
| 7 | 8 | AC001924 | IT | 5 mg/kg | D -8, D -6 | D 0 | D 7 |
| | | (pos 29150) | | | | | |
| 8 | 8 | AC001926 | IT | 5 mg/kg | D -8, D -6 | D 0 | D 7 |
| | | (pos 15886) | | | | | |
| 9 | 8 | AC001924 | IT | 5 mg/kg | D -8, D -6 | D 0 | D 7 |
| | | (pos 29150) + | | | | | |
| | | AC001926 | | | | | |
| | | (pos 15886) | | | | | |

### Results

[0424] The results shown in FIGS. 3 through 8 demonstrate that RNAi agents AC001924 and AC001926 delivered individually or in combination reduce SARS-CoV-2 genomic and subgenomic RNA, reduce total inflammation and alveolar inflammation, reduce the number of PFUs in tissue homogenate, and allows body weight restoration. Specifically, and for example, RNAi agent AC001924 (position 29150) reduced genomic RNA and subgenomic RNA by 83% and 79%, respectively, relative to the SARS-CoV-2 infected saline control group on day 3 post-challenge as shown in FIG. 3 and FIG. 4. Hamsters treated with AC001924 also reduced total lung tissue inflammation and alveolar inflammation (as quantified by HALO) by 49% and 51%, respectively, relative to the SARS-CoV-2 infected saline control group on day 7 post-challenge as shown in FIG. 5 and FIG. 6. Further, AC001924 resulted in an 80% reduction in tissue homogenate PFU on day 3 dpi, as shown in FIG. 7. Lastly, AC001924 treatment resulted in the greatest restoration of body weights following SARS-CoV-2 infection over the course of the study, as reported in FIG. 8.

### Example 11. SARS-COV-2 Delta and Omicron Variants In-Silico Analysis

[0425] In late 2020, the Delta variant (B.1.617.2) of SARS-CoV-2 was first detected in India, and rapidly spread to become the dominant global strain of SARS-CoV-2. An in silico assessment was conducted to determine whether the six identified targeted sequence positions in Table 2 (i.e., CoV RNAi agents targeting the SARS-CoV-2 genome at positions 29150, 6412, 4156, 4917, 14503, and 15886) were conserved across the Delta variant transcripts reported in the NCBI database. A total of 7,794 SARS-CoV-2 transcripts from a human host that had Pango lineage (B.1.617.1, B.1.617.2, and B.1.617.3) were identified, and all six of the identified candidate sequence positions reported in Table 2 were conserved across at least 98% of the reported Delta variant transcripts in the NCBI database. This indicates that CoV RNAi agents designed to target the SARS-CoV-2 RNA at these positions would be expected to inhibit the SARS-CoV-2 Delta variant in the vast majority of infected subjects.

[0426] In November 2021, the Omicron variant (B.1.1.529) of SARS-CoV-2 was reported in South Africa, which was identified as being capable of multiplying approximately 70 times faster than the previously most prominent variant, the Delta variant. Shortly thereafter, the Omicron variant became the most prominent variant across the world. An in silico assessment was conducted to determine whether the six identified targeted sequence positions in Table 2 (i.e., CoV RNAi agents targeting the SARS-CoV-2 genome at positions 29150, 6412, 4156, 4917, 14503, and 15886) were conserved across the reported Omicron gene variant sequences reported in the NCBI database. As of Jan. 31, 2022, there were 820 different Omicron variant genome sequences reported in the NCBI database, and all six of the identified candidate sequence positions reported in Table 2 had sequences that were conserved across 99% of the reported Omicron sequences, indicating that CoV RNAi agents disclosed herein having sequences designed to inhibit expression of SARS-CoV-2 at positions 29150, 6412, 4156, 4917, 14503, and 15886 would be expected to inhibit the SARS-CoV-2 Omicron variant in the vast majority of infected subjects.

### Example 12. In Vitro Testing of CoV RNAi Agents in Vero E6 Cells. Texas

[0427] CoV RNAi agents were evaluated for their effectiveness (individually and in combination) to reduce SARS-CoV-2 virions, genomic and subgenomic RNA. SARS-CoV-2 (BEI Resources, 2019-nCoV/USA-WA1/2020 strain) was obtained, and infected onto Vero E6 cells at a multiplicity of infection (MOI) of 0.001 to create working viral stocks. Viral titers were determined by plaque assay using Vero E6 cells.

[0428] Transfection conditions were characterized for Vero E6 cells. Positive and negative siRNA construct controls were selected. Vero E6 cells were transfected with Lipofectamine RNAiMAX in 96-well plates with 0.1 nM, 1 nM, and 10 nM siRNA. At time points 24 hour (hr), 48 hr, and 72 hr post-transfection, RNA analysis was performed using Invitrogen TaqMan™ Gene Expression Cells to CT™ kit (Invitrogen Catalog No. 4399002). RT-qPCR measurement of positive control mRNA normalized to hPPIA; the hPPIA endogenous control for normalization (cyclophilin A, Thermo Fisher catalog #4326316E).

[0429] SARS-CoV-2 RNAi agents were transfected onto Vero E6 cells. At 48 hr post transfection, the Vero E6 cells (transfected with CoV RNAi agents) were then infected with SARS-CoV-2. Transfection was performed at 5000 cells/well via RNAiMax, MOI 0.01 (200-300 PFU/ml)-96-well-format. The plaque assay immunostained for SARS-NP. Percent % virus inhibition was calculated by the following equation:

$$\frac{[ ( plaques in NC siRNA ) - ( plaques in test siRNA ) ]}{plaques in NC siRNA} \times 100$$

[0430] The CoV RNAi agents tested are listed in the following Table 27. The in vitro screen results are shown in the following Table 28, from two separate experiments.

TABLE 27
CoV RNAi agents screened for Example 12.

| | Targeted Viral | Region of |
|---|---|---|
| AD Duplex ID | Genome Position | CoV Genome |
| AD08584 | 6412 | NSP3 |
| AD08586 | 12284 | NSP8 |
| AD08588 | 13766 | RDRP |
| AD08591 | 14503 | RDRP |
| AD08592 | 14511 | RDRP |
| AD08607 | 26304 | E |
| AD08608 | 26330 | E |
| AD08609 | 26367 | E |
| AD08610 | 26370 | E |
| AD08611 | 26371 | E |
| AD08617 | 27184 | M |
| AD08857 | 10931 | 3CP |
| AD08858 | 11434 | NSP6 |
| AD08859 | 15885 | RDRP |
| AD08860 | 15886 | RDRP |
| AD08862 | 20943 | 2′ORMT |
| AD08930 | 28590 | N |
| AD08933 | 29064 | N |
| AD08935 | 29150 | N |
| AD08929 | 28587 | N |

TABLE 28A
In vitro CoV RNAi agent screening,
percent % CoV virus inhibition.

| AD Duplex ID | % CoV Virus Inhibition | Standard Deviation |
|---|---|---|
| AD08584 | 98.5491 | 0.9135 |
| AD08586 | 100.0000 | 0.0000 |
| AD08588 | 79.1295 | 6.0258 |
| AD08591 | 99.6652 | 0.3702 |
| AD08592 | 99.6652 | 0.5799 |
| AD08607 | 99.4420 | 0.9665 |
| AD08608 | 89.0625 | 1.4293 |
| AD08609 | 85.7143 | 4.0672 |
| AD08610 | 93.8616 | 1.4595 |
| AD08611 | 98.1027 | 3.0340 |
| AD08617 | 58.8170 | 6.2050 |
| AD08857 | 90.9598 | 2.8476 |
| AD08858 | 92.6339 | 1.4974 |
| AD08859 | 97.6563 | 4.0595 |
| AD08860 | 98.5491 | 1.3895 |
| AD08862 | 99.2188 | 0.9135 |
| AD08930 | 98.9955 | 0.7970 |
| AD08933 | 99.6652 | 0.5799 |
| AD08935 | 100.0000 | 0.0000 |
| AD08929 | 99.5536 | 0.3157 |

TABLE 28B
In vitro CoV RNAi agent screening,
percent % CoV virus inhibition.

| AD Duplex ID | % CoV Virus Inhibition | Standard Deviation |
|---|---|---|
| AD08584 | 98.0000 | 1.3237 |
| AD08586 | 99.7273 | 0.4724 |
| AD08588 | 69.0000 | 2.8561 |
| AD08591 | 99.9091 | 0.1575 |
| AD08592 | 99.9091 | 0.1575 |
| AD08607 | 99.7273 | 0.4724 |
| AD08608 | 88.0000 | 1.6262 |
| AD08609 | 83.4545 | 3.3575 |
| AD08610 | 92.2727 | 2.2471 |
| AD08611 | 89.6364 | 1.1923 |
| AD08617 | 45.4545 | 4.6355 |
| AD08857 | 77.6364 | 4.5455 |
| AD08858 | 89.0909 | 1.8363 |
| AD08859 | 99.3636 | 0.3963 |
| AD08860 | 99.1818 | 0.4724 |
| AD08862 | 99.5455 | 0.5961 |
| AD08930 | 99.0909 | 0.7497 |
| AD08933 | 99.6364 | 0.3636 |
| AD08935 | 99.8182 | 0.3149 |
| AD08929 | 99.6364 | 0.2571 |

[0431] As shown in Tables 28A and B, CoV RNAi agents showed inhibition activity, up to 10000 inhibition of the CoV virus inhibition.

### Example 13. Testing of CoV RNAi Agents in Golden Syrian Hamsters Against SARS-CoV-2 Infection

[0432] Golden Syrian hamsters are described as a suitable model to test vaccines and therapeutics for the treatment of SARS-CoV-2 infection. The hamster model of SARS-CoV-2 infection shows signs of weight loss (morbidity), viral replication in the lungs and nasal turbinate, and significant histopathology changes including immune cell infiltration into the lungs. SARS-CoV-2 infection in the hamster model mimics mild SARS-CoV-2 infections reported in humans and, therefore, represents an excellent tool to test anti-SARS-CoV-2 agents (Chen et al, 2020; Imai et al, 2020).

[0433] Vero E6 cells obtained from the American Type Culture Collection (ATCC, CRL-1586) were cultured in Dulbecco's Modified Eagle Medium (DMEM) supplemented with 10% heat inactivated fetal bovine serum (FBS), penicillin (P; 100 IU/ml), streptomycin (S; 100 μg/ml) and L-glutamine (G; 292 μg/ml)) at 37° C. in a 5% CO₂ atmosphere.

[0434] SARS-CoV-2 WA-1/US 2020 strain (Genbank accession MT020880) was obtained from the Biodefense and Emerging Infections Research Resources Repository (BEI Resources, NR-52281). This SARS-CoV-2 WA-1/US 2020 strain was isolated from an oropharyngeal swab from a middle-age patient with a respiratory illness in January 2020 in the state of Washington, US. The virus stock received from BEI Resources was a passage (P4) stock. BEI Resources P4 stock was used to generate a master P5 seed stock. The P5 stock was further used to generate a P6 working stock. Both P5 and P6 SARS-CoV-2 WA-1/US 2020 stocks were generated by infecting Vero E6 cells at low multiplicity of infection (MOI, 0.01) for 72 h. At 72 h post-infection, tissue culture supernatants were collected, clarified, aliquoted, and stored at −80° C. A standard plaque assay (plaque forming units, PFU/ml) in Vero E6 cells was used to titrate P6 viral stock (2.5×10⁶ PFU/ml). Both P5 seed and P6 working stocks were sequenced, using next generation sequencing, and were identical to the BEI Resources original stock compromising virus infectivity.

[0435] Five-week-old male golden Syrian hamsters (n=70 and n=5 spare) were purchased from Charles River Laboratories (Wilmington, MA). Hamsters were provided sterile water and chow ad libitum and acclimatized for at least one week prior to experimental manipulation. All hamsters were healthy at the start of the experiment and ear tagged for identification.

[0436] Animals were distributed to the experimental groups as shown in Table 29. Animals were administered with either saline or test article (5 mg/kg in 2 ml/kg) via the intra-tracheal route on days −7 and −5. AC001888 includes an antisense strand nucleotide sequence targeting position 6412 of the SARS-CoV-2 genome, and AC001961 includes an antisense strand nucleotide sequence targeting position 28587 of the SARS-CoV-2 genome. The hamsters were challenged on day 7 post first administration of test articles, with 2×10⁵ PFU of SARS-CoV-2 (day 0). Hamsters were weighed daily and dosing volume was calculated and adjusted as weight changed for individual hamster. Animals were monitored for morbidity and mortality during the study and were euthanized on days 3 and 7 post infection by intraperitoneal injection of pentobarbital overdose (Fatal plus).

TABLE 29
CoV RNAi agent dosing for animal test groups.

| | Number of | Treatment | | Challenge |
|---|---|---|---|---|
| Experimental Group | Animals | Day | Route | (Intranasal) |
| Saline | 6 | Day −7, −5 | Intratracheal | SARS-CoV-2 |
| Saline + SARS-CoV-2 | 16 | Day −7, −5 | Intratracheal | SARS-CoV-2 |
| AC001888 + SARS- | 16 | Day −7, −5 | Intratracheal | SARS-CoV-2 |
| CoV-2 | | | | |
| AC001961 + SARS- | 16 | Day −7, −5 | Intratracheal | SARS-CoV-2 |
| CoV-2 | | | | |
| AC001888 + AC001961 + | 16 | Day −7, −5 | Intratracheal | SARS-CoV-2 |
| SARS-CoV-2 | | | | |

[0437] During necropsy, the trachea was cannulated and secured with a 2-0 suture, lungs were harvested and rinsed with PBS, and blot dried to avoid PBS getting into the airways. The right bronchus was clamped and ligated and right lung lobes were cut in half and weighed. One half of the right lung lobes were homogenized in Trizol for RNA isolation. The other half was homogenized in 1 ml of sterile PBS using Precellys tissue homogenizer (Bertin Instruments, Rockville, MD). Lung homogenates were centrifuged at 8,000×g for 15 min at 4° C. and supernatants were collected in aliquots and stored at −80° C. Left lungs were inflated (gravity instillation method) with 3 mL of 10% neutral buffered formalin fixative maintaining 23-25 cmH₂O pressure with fixative for 5 mins to prevent collapse and were submerged in over 10× volumes of 10% formalin (about 35 ml) for 7 days at room temperature. Ligature was removed seven days later, tissue rinsed with PBS, and transferred into 70% ethanol for further processing into paraffin blocks.

[0438] Vero E6 cells were seeded at a density of 2×10⁵ cells/well in flat bottom 24-well tissue culture plates. The following day, media was removed and replaced with 100 μl of ten-fold serial dilutions of the lung homogenate. Virus was adsorbed for 1 h at 37° C. in a humidified 5% CO₂ incubator. After viral adsorption, post infection media containing 0.9% agarose overlay (Sigma-Aldrich) was added and cells were incubated in a humidified 5% CO₂ incubator at 37° C. for 48 h. After 48 h, plates were inactivated in 10% neutral buffered formalin (NBF, Thermo-Fisher Scientific) for 12 h. For immunostaining, cells were washed three times with PBS and permeabilized with 0.5% Triton X-100 for 10 min at room temperature. Cells were immuno-stained with 1 μg/ml of a SARS-CoV-1/-2 nucleocapsid protein (NP) cross-reactive monoclonal antibody (Mab; Sigma-Aldrich) 1C7, diluted in 1% BSA for 1 h at 37° C. After incubation with the primary NP Mab, cells were washed three times with PBS, and developed with the Vectastain ABC kit and DAB Peroxidase Substrate kit (Vector 580 Laboratory, Inc., CA, USA) according to manufacturers' instructions. Viral determinations were counted and viral titers were calculated by number of counted plaques for a given dilution, and results were presented as PFU/ml.

[0439] One half of the right lung lobes was weighed and Trizol was calculated and added corresponding to lung tissue weight (1 ml Trizol/100 mg tissue). The tissues were homogenized using Precellys tissue homogenizer (Bertin Instruments, Rockville, MD) and the homogenate was stored at −80 C until RNA extraction. The frozen samples were thawed and 200 μl of chloroform was added to 1 ml lung homogenate. The tubes were then centrifuged and the aqueous layer transferred to a fresh tube. The subsequent steps were performed using on the KingFisher Flex System (Thermo Fisher) with NucleoMag Pathogen kit (Macherey-Nagel 744210.4).

[0440] Hamsters were daily weighed just before the saline/test article treatment i.e. 7 days before SARS-CoV-2 infection (day 0) until the end of the study. Body weight at day −7 was used to calculate % body weight gain/loss in the pre-infection phase. Hamsters in all experimental groups continued to gain weight and showed no signs of morbidity post saline or test articles treatment. All hamsters remained healthy throughout the duration treatment (up to the day of virus challenge). As shown in FIG. 9, the groups receiving saline (n=22) had an average weight gain of 12.9%, whereas groups receiving AC001888 (n=16), AC001961 (n=16) and AC001888+AC001961 (n=16) had an average weight gain of 13.7%, 10.7% and 12.5% respectively on day 7 post first treatment.

[0441] After SARS-CoV-2 infection, hamsters in saline group showed an average body weight loss of 7.3%, whereas hamsters in AC00188, AC001961 and AC00188+AC001961 showed an average body weight loss of 7.5%, 8.06% and 8.22% by day 3 post infection, respectively (n=16/group). On day 6 post infection, hamsters in saline, AC001888, AC001961 and AC001888+AC001961 showed an average body weight loss of 9.7%, 7.4%, 13.4% and 11.4% respectively (n=8/group; FIG. 10). Body weight at day 0 was used to calculate % body weight gain/loss in post infection phase.

[0442] To determine the anti-SARS-CoV-2 effect of test articles, we performed plaque assay to quantitate viral titers in the lungs. Eight hamsters from each group were euthanized at days 3 and 7 post-infection and lungs were collected as described above. The viral titers are shown in FIGS. 11 and 12. At day 3 post infection, the average viral titers in the control group (Saline+SARS-CoV-2) was 1.3×10⁶ PFU/ml; whereas for the groups receiving the test articles, the average viral titers were; 9.5×10⁵ (AC001888); 4.9×10⁶ (AC001961) and 4.1×10⁶ (AC001888+AC001961) PFU/ml. No virus was detected at day 7 post infection in any of the groups. FIG. 12 represents the viral titer normalized to the weight of the tissue and expressed as PFU/gram of lung tissue. Viral load in lungs of saline and test article treated and SARS-CoV-2 infected hamsters showed comparable viral load (FIGS. 11 and 12).

[0443] Viral genomic and subgenomic RNA copies were quantitated by RT-PCR using CDC recommended primers and probes set in the lung homogenate at day 3 and 7 post infection (FIGS. 13 and 14). The primer and probe set amplified the nucleoprotein (N) region of SARS-CoV-2 for genomic RNA copies, whereas the primer and probe set amplified the envelope (E) region for subgenomic RNA copies.

[0444] At day 3 post infection, the average genomic copies in the control group (Saline+SARS-CoV-2) was 10.9 logs/100 mg of lung tissue, whereas, among the test article groups, the average genomic copies measured were 10.6 (AC001888); 10.7 (AC001961) and 10.4 (AC001888+AC001961) logs/100 mg of lung tissue. The subgenomic RNA copies were approximately 2 logs lower than the genomic copies. The average subgenomic copies in the control group was 9.1 logs/100 mg of lung tissue, whereas, among the test article groups, the average subgenomic copies measured were 8.8 (AC001888); 8.9 (AC001961) and 8.8 (AC001888+AC001961) logs/100 mg of lung tissue.

[0445] The genomic and subgenomic viral RNA copies were also detected in lung tissues obtained at day 7 post infection. The levels were 2 to 3 logs lower than that observed on day 3 post infection. The average genomic copies in the control group were 7.9 logs/100 mg of lung tissue, whereas, among the test article groups, the average genomic copies measured were 7.9 (AC001888); 8 (AC0001961) and 8.4 (AC001888+AC001961) logs/100 mg of lung tissue. The average subgenomic copies in the control group at day 7 post infection was 6.1 logs/100 mg of lung tissue, whereas, among the test article groups, the average subgenomic copies measured were 6 (AC001888); 6.3 (AC001961) and 6.5 (AC001888+AC001961) logs/100 mg of lung tissue.

### Example 14. Testing of CoV RNAi Agents in Golden Syrian Hamsters Against SARS-CoV-2 Infection

[0446] SARS-CoV-2, USA-WA1/2020 strain (Gen Bank: MN985325.1) was obtained from BEI Resources (NR-52281). Passage 6 (P6) of SARS-CoV-2 was generated by infecting Vero E6 cells obtained from the American Type Culture Collection (ATCC, CRL-1586) for 72 h. At 72 h post-infection, tissue culture supernatants were collected, clarified, aliquoted, and stored at −80° C. A standard plaque assay (plaque forming units, PFU/ml) in Vero E6 cells was be used to titrate P6 viral stocks. P6 working stock was sequenced and was compared to the original stock for deletions or mutations compromising virus infectivity as provided by BEI Resources.

[0447] Six-eight weeks old male golden Syrian hamsters were purchased from Charles River Laboratories (Wilmington, MA.). Hamsters were provided sterile water and chow ad libitum and acclimatized for at least one week prior to experimental manipulation. Baseline body weights were measured before infection. Hamsters were infected intranasally (i.n., 50 μl per nostril) with 1×10⁴ PFU of SARS-CoV-2 in a final volume of 100 μl following isoflurane sedation.

[0448] Hamsters were housed in micro-isolator cages at the ABSL3. Hamsters were provided sterile water and chow ad libitum and acclimatized for at least one week prior to experimental manipulation. Baseline body weights were measured before treatment for RNAi dose calculations. Hamsters were treated by intra-tracheal route on day (−7) and (−5) before infection following isoflurane sedation. Hamsters were monitored and body weight recorded. On study day 0 (5 days post second RNAi treatment) hamsters were infected intranasally (i.n., 50 μl per nostril) with 1×10⁴ PFU of SARS-CoV-2 in a final volume of 100 μl following isoflurane sedation. Hamsters were monitored and body weight recorded up to day 7 post infection. On day 3 and 7 post infection, hamsters were euthanized by intra-peritoneal injection of pentobarbital overdose (Fatal plus).

TABLE 30
CoV RNAi agent dosing for animal test groups.

| | RNAi Agent | Number of | Treatment | | |
|---|---|---|---|---|---|
| Experimental Group | Dose | Animals | Day | Route | Challenge (Intranasal), at Day 0 |
| 1. Naïve, no infection | N/A | 3 | Day −7, −5 | Intratracheal | N/A |
| 2. Saline, no infection | N/A | 3 | Day −7, −5 | Intratracheal | N/A |
| 3. Saline, SARS-CoV-2 | N/A | 16 | Day −7, −5 | Intratracheal | SARS-CoV-2, 1 × 10⁴ PFU |
| 4. AC002623, SARS-CoV-2 | 5 mg/kg | 16 | Day −7, −5 | Intratracheal | SARS-CoV-2, 1 × 10⁴ PFU |
| 5. AC002622, SARS-CoV-2 | 5 mg/kg | 16 | Day −7, −5 | Intratracheal | SARS-CoV-2, 1 × 10⁴ PFU |
| 6. AC002619, SARS-CoV-2 | 5 mg/kg | 16 | Day −7, −5 | Intratracheal | SARS-CoV-2, 1 × 10⁴ PFU |
| 7. AC001927 (RISC-blocked), | 5 mg/kg | 16 | Day −7, −5 | Intratracheal | SARS-CoV-2, 1 × 10⁴ PFU |
| SARS-CoV-2 | | | | | |
| 8. AC002617, SARS-CoV-2 | 5 mg/kg | 16 | Day −7, −5 | Intratracheal | SARS-CoV-2, 1 × 10⁴ PFU |
| 9. AC002618, SARS-CoV-2 | 5 mg/kg | 16 | Day −7, −5 | Intratracheal | SARS-CoV-2, 1 × 10⁴ PFU |
| 10. AC002620, SARS-CoV-2 | 5 mg/kg | 16 | Day −7, −5 | Intratracheal | SARS-CoV-2, 1 × 10⁴ PFU |
| 11. AC002621, SARS-CoV-2 | 5 mg/kg | 16 | Day −7, −5 | Intratracheal | SARS-CoV-2, 1 × 10⁴ PFU |

[0449] AC002617 and AC002618 each include an antisense strand nucleotide sequence targeting position 6412 of the SARS-CoV-2 genome; AC002619 includes an antisense strand nucleotide sequence targeting position 29150 of the SARS-CoV-2 genome; AC002620 includes an antisense strand nucleotide sequence targeting position 4917 of the SARS-CoV-2 genome; AC002621 includes an antisense strand nucleotide sequence targeting position 4156 of the SARS-CoV-2 genome; AC002622 includes an antisense strand nucleotide sequence targeting position 15886 of the SARS-CoV-2 genome; and AC002623 includes an antisense strand nucleotide sequence targeting position 14503 of the SARS-CoV-2 genome.

[0450] Trachea were cannulated and secured with 2-0 or 1-0 suture. The lung was harvested in monobloc without heart, lobes rinsed with PBS and blotted dry, while αvoiding getting PBS into airways. Left bronchus was clamped with mosquito, ligated and left lung lobe was cut longitudinally and both halves were weighed. One half of the lobe was collected in a cryovial for RNA isolation using Trizol homogenization. SARS-CoV-2 RNA was measured with CDC recommended N1 probe for genomic copies and probe in E for subgenomic RNA copies, by real-time reverse transcriptase qPCR (RT-qPCR). The other half of the left lung lobe was collected in PBS and homogenized aliquots were frozen at −80 C for PFU measurement.

[0451] Right lungs were inflated with gravity instillation of 10% neutral buffered formalin fixative maintaining 23-25 cm H₂O pressure with fixative for 5 minutes to prevent collapse, ligated to keep fixative in lung, and submerged in over 10× volumes of fixative for 7 days at room temperature. Ligatures were removed and tissue rinsed with PBS. Further processing into paraffin blocks was to measure inflammation, perform immunohistochemistry of viral proteins (TBD), and for RNA scope detection of viral RNA.

[0452] The hamsters in groups 3-6 were treated as one cohort. Hamsters were daily weighed just before the saline/test article treatment i.e. 7 days before SARS-CoV-2 infection (day 0) until the end of the study. Body weight at day −7 was used to calculate % body weight gain/loss in the pre-infection phase. Hamsters in all experimental groups continued to gain weight and showed no signs of morbidity post saline or test articles treatment. All hamsters remained healthy throughout the duration treatment (up to the day of virus challenge). As shown in FIG. 15A, the groups receiving saline (n=16) had an average weight gain of 8.6%, whereas groups receiving AC002623 (n=16), AC002622 (n=16) and AC002619 (n=16) had an average weight gain of 10.3, 10.5 and 10.9% respectively on day 7 post first treatment.

[0453] After SARS-CoV-2 infection, hamsters in saline group showed an average body weight loss of 7.4%, whereas hamsters in AC002623, AC002622 and AC002619 showed an average body weight loss of 6.6%, 5.8% and 5.9% by day 3 post infection respectively (n=16/group). On day 6 post infection, hamsters in saline, AC002623, AC002622 and AC002619 showed an average body weight loss of 7.5%, 4.75%, 2.8% and 1.7% respectively (n=8/group; FIG. 15B). Body weight at day 0 was used to calculate % body weight gain/loss in post infection phase.

[0454] The genomic and subgenomic CoV viral copy levels 3 days post infection are shown in FIGS. 16A and 16B, respectively. As shown in FIG. 16A, CoV RNAi agents AC002622 and AC002619 both demonstrate significant reduction of CoV genomic viral RNA 3 days post CoV infection. At day 3 post infection, the average genomic copies in the control group (Saline+SARS-CoV-2) was 10.0 logs/100 mg of lung tissue, whereas, among the test article groups, the average genomic copies measured were 9.9 (AC002623); 9.6 (AC002622) and 9.4 (AC002619) logs/100 mg of lung tissue. The subgenomic RNA copies were approximately 2 logs lower than the genomic copies. The average subgenomic copies in the control group was 8.4 logs/100 mg of lung tissue, whereas, among the test article groups, the average subgenomic copies measured were 8.5 (AC002623); 8.2 (AC002622) and 8.1 (AC002619) logs/100 mg of lung tissue.

[0455] The genomic and subgenomic CoV viral copy levels 7 days post infection are shown in FIGS. 17A and 17B, respectively. The average genomic copies in the control group were 8.1 logs/100 mg of lung tissue, whereas, among the test article groups, the average genomic copies measured were 7.8 (AC002623), 7.8 (AC002622) and 7.5 (AC002619) logs/100 mg of lung tissue. The average subgenomic copies in the control group at day 7 post infection was 6.4 logs/100 mg of lung tissue, whereas, among the test article groups, the average subgenomic copies measured were 6.2 (AC002623), 6.1 (AC002622) and 6.0 (AC002619) logs/100 mg of lung tissue.

[0456] The viral titers determined by plaque assay in PFU/ml as described in Example 13 are shown in FIG. 18A. At day 3 post infection, the average viral titers in the control group (Saline+SARS-CoV-2) was 5.5 log 10 PFU/ml; whereas for the groups receiving the test articles, the average viral titers were 5.4 log 10 (AC002623); 5.2 log 10 (AC002622) and 5.3 log 10 (AC002619) PFU/ml. FIG. 18B represents the viral titer normalized to the weight of the tissue and expressed as PFU/gram of lung tissue. The average viral load in lungs of the control group infected hamsters (Saline+SARS-CoV-2) at day 3 post infection was 6.2 log 10 PFU/g and in the groups receiving the test articles were 6.1 log 10 (AC002623); 5.8 log 10 (AC002622) and 6.2 log 10 (AC002619) PFU/g. On Day 7 post infection, no virus was detected by plaque assay.

[0457] The hamsters in groups 7-11 were treated as a separate cohort. In this cohort the trigger employed specific chemical modifications to block the antisense strand from RISC-loading (AC001927), which served as a control. As such, AC001927 was unable to initiate RISC and RNAi-mediated gene expression silencing. Hamsters were daily weighed just before the saline/test article treatment i.e. 7 days before SARS-CoV-2 infection (day 0) until the end of the study. Body weight at day −7 was used to calculate % body weight gain/loss in the pre-infection phase. Hamsters in all experimental groups continued to gain weight and showed no signs of morbidity post control trigger or test articles treatment. All hamsters remained healthy throughout the duration treatment (up to the day of virus challenge). As shown in FIG. 19A, the groups receiving blocked control AC001927 (n=16) had an average weight gain of 17.3%, whereas groups receiving AC002617 (n=16), AC002618 (n=16), AC002620 (n=16) and AC002621 (n=16) had an average weight gain of 28.8, 19.8, 18.4 and 17.9, respectively, on day 7 post first treatment.

[0458] After SARS-CoV-2 infection, hamsters in AC001927 control group showed an average body weight loss of 2.2%, whereas hamsters treated with AC002617, AC002618, AC002620 and AC002621 showed an average body weight loss of 2.3%, −0.6% (Gaining weight), 1.4% and −3.1% (Gaining weight) by day 3 post infection, respectively (n=16/group). On day 7 post infection, hamsters receiving AC001927, AC002617, AC002618, AC002620 and AC002621 showed an average body weight loss of 10.2%, 9.4%, 6.1%, 8.6% and −1.1% (Gaining weight), respectively (n=8/group; FIG. 19B). Body weight at day 0 was used to calculate % body weight gain/loss in post infection phase.

[0459] The genomic and subgenomic CoV viral copy levels 3 days post infection are shown in FIGS. 20A and 20B, respectively. CoV RNAi agents AC002617, AC002618, AC002620, and AC002621 all demonstrate significant reduction of both CoV genomic and subgenomic viral RNA 3 days post CoV infection. At day 3 post infection, the average genomic copies in the control group (AC001927+SARS-CoV-2) was 11.4 logs/100 mg of lung tissue, whereas, among the test article groups, the average genomic copies measured were 10.3 (AC002617), 10.4 (AC002618), 10.4 (AC002620) and 10.0 (AC002621) logs/100 mg of lung tissue. The subgenomic RNA copies were approximately 2 logs lower than the genomic copies. The average subgenomic copies in the control AC001927 group was 9.6 logs/100 mg of lung tissue, whereas, among the test article groups, the average subgenomic copies measured were 9.2 (AC002617), 9.1 (AC002618), 9.1 (AC002620) and 8.6 (AC002621) logs/100 mg of lung tissue.

[0460] The genomic and subgenomic CoV viral copy levels 7 days post infection are shown in FIGS. 21A and 21B, respectively. The average genomic copies in the control group were 8.4 logs/100 mg of lung tissue, whereas, among the test article groups, the average genomic copies measured were 8.6 (AC002617), 7.8 (AC002618), 8.1 (AC002620) and 7.9 (AC002621) logs/100 mg of lung tissue. The average subgenomic copies in the control group at day 7 post infection was 6.6 logs/100 mg of lung tissue, whereas, among the test article groups, the average subgenomic copies measured were 6.8 (AC002617), 6.0 (AC002618), 6.6 (AC002620) and 6.2 (AC002621) logs/100 mg of lung tissue.

[0461] The viral titers determined by plaque assay in PFU/ml as described in Example 13 are shown in FIG. 21C. At day 3 post infection, the average viral titers in the control AC001927 group was 5.3 log 10 PFU/ml; whereas for the groups receiving the test articles, the average viral titers were 5.2 log 10 (AC002617); 4.8 log 10 (AC002618); 5.1 log 10 (AC002620) and 4.3 log 10 (AC002621) PFU/ml. FIG. 21D represents the viral titer normalized to the weight of the tissue and expressed as PFU/gram of lung tissue. The average viral load in lungs of the control AC001927 group infected hamsters at day 3 post infection was 5.87 log 10 PFU/g and in the groups receiving the test articles were 6 log 10 (AC002617); 5.5 log 10 (AC002618); 5.7 log 10 (AC002620) and 5.1 log 10 (AC002621) PFU/g. On Day 7 post infection, no virus was detected by plaque assay.

[0462] Inflammation in hamster lung tissue was measured from hematoxylin and eosin (H&E) staining of right superior lobe tissue sections followed by HALO quantitation. FIG. 22A shows group averages of the total pulmonary inflammation as a percentage of the tissue on Day 7 after infection in hamsters that were naïve and uninfected (1.9%), uninfected saline controls (1.3%), infected saline controls (30.2%), treated with RISC-blocked negative control AC001927 and infected (39.3%), and groups treated with CoV RNAi agents AC002617 (32.2%), AC002618 (18.4%), AC002620 (31.2%), and AC002621 (3.5%). FIG. 22B shows the percentage of the alveolar lung area with inflammation in naïve and uninfected (2.1%), uninfected saline controls (1.4%), infected saline controls (35.2%), treated with RISC-blocked negative control AC001927 and infected (48.7%), and groups treated with CoV RNAi agents AC002617 (39.9%), AC002618 (20.9%), AC002620 (37.2%), and AC002621 (3.7%). Syrian golden hamsters infected with SARS-CoV-2, upon treatment with the CoV RNAi agent AC002621, showed significant reduction in pulmonary inflammation in both total area and alveolar area.

[0463] Superior lobe tissue sections stained with H&E are shown in FIGS. 23 and 24. FIG. 23A shows pulmonary tissue of the uninfected naïve and saline-injected hamsters. FIG. 23B demonstrates that three days post-infection the lungs of hamsters injected with RISC-blocked AC001927 were similarly inflamed to those of saline-injected and infected hamsters. FIGS. 23C, 23D, 23E and 23F show the superior lobe of the hamster lungs infected with SARS-CoV-2, subsequent treatment with the CoV RNAi agents, at 3 days post infection, compared to the saline control treated with SARS-CoV-2. The CoV RNAi agent AC002621 (FIG. 23F) achieved significant reduction in lung inflammation. More specifically, AC002621 demonstrates marked reduction in lung inflammation compared to the other CoV RNAi agents in this study.

[0464] FIGS. 24A, 24B, 24C, 24D, and 24E show the superior lobe of the hamster lungs infected with SARS-CoV-2, subsequent treatment with RISC-blocked negative control AC0001927 (FIG. 24A) or the CoV RNAi agents, at 7 days post infection, compared to the saline control treated with SARS-CoV-2. Inflammation in hamsters treated with the negative control AC001927 was similar to that in hamsters injected with saline (FIG. 24A). As shown these five Figures, the CoV RNAi agent AC002621 (FIG. 24E) demonstrates marked reduction in lung inflammation compared to the other CoV RNAi agents.

### Example 15. Testing of CoV RNAi Agents in Golden Syrian Hamsters Against SARS-CoV-2 Infection

[0465] Golden Syrian hamsters are described as a suitable model to test vaccines and therapeutics for the treatment of SARS-CoV-2 infection. The hamster model of SARS-CoV-2 infection shows signs of weight loss (morbidity), viral replication in the lungs and nasal turbinate, and significant histopathology changes including immune cell infiltration into the lungs. SARS-CoV-2 infection in the hamster model mimics mild SARS-CoV-2 infections reported in humans, and, therefore represents an excellent tool to test anti-SARS-CoV-2 agents (Chen et al, 2020; Imai et al, 2020).

[0466] Thirteen (13) week old male Syrian golden hamsters were selected for this study. Animals were distributed to the experimental groups as shown in Tables 31 and 32. Animals were administered with either saline or test article (2 ml/kg) via the intra-tracheal route on days −14 and −12. The hamsters were challenged 14 days post first administration of test articles, with 1×10⁵′ PFU of SARS-CoV-2 (day 0). Hamsters were weighed daily and dosing volume was calculated and adjusted as weight changed for individual hamster. Animals were monitored for morbidity and mortality during the study and were euthanized on days 3 and 7 post infection.

[0467] Upon euthanasia, lung tissue was harvested. Right lung lobes were separated from the main bronchus, cut in half, and further processed for RNA isolation and viral RNA qPCR analysis. Left lung was fixed processed for RNA scope and immunohistochemistry.

TABLE 31
CoV RNAi agent dosing for animal test groups, euthanized at 3 days post-infection.

| | | Number of | Treatment | | |
|---|---|---|---|---|---|
| Experimental Group | RNAi Agent Dose | Animals | Day | Route | Challenge (Intranasal) |
| Saline + SARS-CoV-2 | N/A | 8 | Day −14, −12 | Intratracheal | SARS-CoV-2, 5 × 10⁴ PFU/nostril |
| AC000234 + SARS- | 5 mg/kg | 8 | Day −14, −12 | Intratracheal | SARS-CoV-2, 5 × 10⁴ PFU/nostril |
| CoV-2 | | | | | |
| AC000234 + AC001888 + | 2.5 mg/kg AC000234, | 8 | Day −14, −12 | Intratracheal | SARS-CoV-2, 5 × 10⁴ PFU/nostril |
| SARS-CoV-2 | 2.5 mg/kg AC001888 | | | | |
| AC001888 + SARS- | 5 mg/kg | 8 | Day −14, −12 | Intratracheal | SARS-CoV-2, 5 × 10⁴ PFU/nostril |
| CoV-2 | | | | | |

TABLE 32
CoV RNAi agent dosing for animal test groups, euthanized at 7 days post-infection.

| | | Number of | Treatment | | |
|---|---|---|---|---|---|
| Experimental Group | RNAi Agent Dose | Animals | Day | Route | Challenge (Intranasal) |
| Saline* | N/A | 1 | Day −14, −12 | Intratracheal | N/A |
| Saline + SARS-CoV-2 | N/A | 8 | Day −14, −12 | Intratracheal | SARS-CoV-2, 5 × 10⁴ PFU/nostril |
| AC000234 + SARS- | 5 mg/kg | 8 | Day −14, −12 | Intratracheal | SARS-CoV-2, 5 × 10⁴ PFU/nostril |
| CoV-2 | | | | | |
| AC000234 + AC001888 + | 2.5 mg/kg AC000234, | 8 | Day −14, −12 | Intratracheal | SARS-CoV-2, 5 × 10⁴ PFU/nostril |
| SARS-CoV-2 | 2.5 mg/kg AC001888 | | | | |
| AC001888 + SARS- | 5 mg/kg | 8 | Day −14, −12 | Intratracheal | SARS-CoV-2, 5 × 10⁴ PFU/nostril |
| CoV-2 | | | | | |

*Euthanized on post infection Day 6.

[0468] From Day −14 to +7, body weight measurements were collected for all of the experimental groups as well as the saline group. The body weights over time for all of the experimental groups are shown in FIG. 25A. When compared to the saline group infected with SARS-CoV-2, all of the experimental groups dosed with the CoV RNAi agents showed improved body weight recovery. Body weight recovered more quickly in groups treated with AC000234 COV RNAi agent than from AC001888 CoV RNAi agent alone.

[0469] FIG. 25B shows the total pulmonary inflammation area of the experimental groups treated with the CoV RNAi agents, in comparison with the non-treated saline. As shown in FIG. 25B, Syrian golden hamsters infected with SARS-CoV-2, upon treatment with the CoV RNAi agents, showed reduction in total area of pulmonary inflammation for all of the experimental groups treated with the CoV RNAi agents.

[0470] FIGS. 25C, 25D, 25E, and 25F show the genomic and subgenomic RNA levels at 3 and 7 days post infection by SARS-CoV-2. At Day 3 post infection, AC001888 achieved roughly 77% reduction in genomic RNA and 70% reduction in subgenomic RNA. At Day 7 post infection, AC000234 achieved roughly 85% reduction in genomic RNA and 87% reduction in subgenomic RNA, and AC001888 achieved roughly 96% reduction in both genomic and subgenomic RNA.

[0471] AC000234 is an RNAi agent designed to initiate RISC and RNAi in transmembrane serine protease 2 (TMPRSS2), and is not targeted to the SARS-CoV-2 viral genome.

### OTHER EMBODIMENTS

[0472] It is to be understood that while the invention has been described in conjunction with the detailed description thereof, the foregoing description is intended to illustrate and not limit the scope of the invention, which is defined by the scope of the appended claims. Other aspects, advantages, and modifications are within the scope of the following claims.

1. An RNAi agent for inhibiting expression of a coronavirus (CoV) genome, comprising:
an antisense strand comprising at least 17 contiguous nucleotides differing by 0 or 1 nucleotides from any one of the sequences provided in Table 2 or Table 3; and
a sense strand comprising a nucleotide sequence that is at least partially complementary to the antisense strand.

2. The RNAi agent of claim 1, wherein the antisense strand comprises nucleotides 2-18 of any one of the sequences provided in Table 2 or Table 3.

3. The RNAi agent of claim 1 or claim 2, wherein the sense strand comprises a nucleotide sequence of at least 17 contiguous nucleotides differing by 0 or 1 nucleotides from any one of the sequences provided in Table 2 or Table 4, and wherein the sense strand has a region of at least 85% complementarity over the 17 contiguous nucleotides to the antisense strand.

4. The RNAi agent of any one of claims 1-3, wherein at least one nucleotide of the RNAi agent is a modified nucleotide or includes a modified intemucleoside linkage.

5. The RNAi agent of any one of claims 1-4, wherein all or substantially all of the nucleotides are modified nucleotides.

6. The RNAi agent of any one of claims 4-5, wherein the modified nucleotide is selected from the group consisting of: 2′-O-methyl nucleotide, 2′-fluoro nucleotide, 2′-deoxy nucleotide, 2′,3′-seco nucleotide mimic, locked nucleotide, 2′-F-arabino nucleotide, 2′-methoxyethyl nucleotide, abasic nucleotide, ribitol, inverted nucleotide, inverted 2′-O-methyl nucleotide, inverted 2′-deoxy nucleotide, 2′-amino-modified nucleotide, 2′-alkyl-modified nucleotide, morpholino nucleotide, vinyl phosphonate-containing nucleotide, cyclopropyl phosphonate-containing nucleotide, and 3′-O-methyl nucleotide.

7. The RNAi agent of claim 5, wherein all or substantially all of the nucleotides are modified with 2′-O-methyl nucleotides, 2′-fluoro nucleotides, or combinations thereof.

8. The RNAi agent of any one of claims 1-7, wherein the antisense strand comprises the nucleotide sequence of any one of the modified sequences provided in Table 3.

9. The RNAi agent of any one of claims 1-8, wherein the sense strand comprises the nucleotide sequence of any one of the modified sequences provided in Table 4.

10. The RNAi agent of claim 1, wherein the antisense strand comprises the nucleotide sequence of any one of the modified sequences provided in Table 3 and the sense strand comprises the nucleotide sequence of any one of the modified sequences provided in Table 4.

11. The RNAi agent of any one of claims 1-10, wherein the sense strand is between 18 and 30 nucleotides in length, and the antisense strand is between 18 and 30 nucleotides in length.

12. The RNAi agent of claim 11, wherein the sense strand and the antisense strand are each between 18 and 27 nucleotides in length.

13. The RNAi agent of claim 12, wherein the sense strand and the antisense strand are each between 18 and 24 nucleotides in length.

14. The RNAi agent of claim 13, wherein the sense strand and the antisense strand are each 21 nucleotides in length.

15. The RNAi agent of claim 14, wherein the RNAi agent has two blunt ends.

16. The RNAi agent of any one of claims 1-15, wherein the sense strand comprises one or two terminal caps.

17. The RNAi agent of any one of claims 1-16, wherein the sense strand comprises one or two inverted abasic residues.

18. The RNAi agent of claim 1, wherein the RNAi agent is comprised of a sense strand and an antisense strand that form a duplex having the structure of any one of the duplexes in Table 7A, Table 7B, Table 8, Table 9, or Table 10.

19. The RNAi agent of claim 18, wherein all or substantially all of the nucleotides are modified nucleotides.

20. The RNAi agent of claim 1, comprising an antisense strand that consists of, consists essentially of, or comprises a nucleotide sequence that differs by 0 or 1 nucleotides from one of the following nucleotide sequences (5′→3′):
(SEQ ID NO: 1122)
UUAGUAGGUAUAACCACAGCA;
or
(SEQ ID NO: 1113)
UUUGUAAUCAGUUCCUUGUCC.

21. The RNAi agent of any one of claims 1-20, wherein the nucleotides of the antisense strand located at position 2 and position 14 from the 5′-end are 2′-fluoro modified nucleotides.

22. The RNAi agent of claim 21, wherein the nucleotide of the antisense strand at position 2 is a 2′-fluoro uridine, and the nucleotide of the antisense strand at position 14 is a 2′-fluoro cytidine, and wherein the antisense strand comprises 3 or 4 phosphorothioate internucleoside linkages.

23. The RNAi agent of any one of claims 1-22, wherein the sense strand consists of, consists essentially of, or comprises a nucleotide sequence that differs by 0 or 1 nucleotides from one of the following nucleotide sequences (5′→3′):
(SEQ ID NO: 1198)
UGCUGUGGUUAUACCUACUAA;
or
(SEQ ID NO: 1189)
GGACAAGGAACUGAUUACAAA.

24. The RNAi agent of any one of claims 20-23, wherein all or substantially all of the nucleotides are modified nucleotides.

25. The RNAi agent of claim 1, comprising an antisense strand that comprises, consists of, or consists essentially of a modified nucleotide sequence that differs by 0 or 1 nucleotides from one of the following nucleotide sequences (5′→3′):
(SEQ ID NO: 779)
cPrpusUfsasGfuAfgGfuAfuAfaCfcAfcAfgCfsa;
or
(SEQ ID NO: 746)
cPrpusUfsusGfuAfaUfcAfgUfuCfcUfuGfuCfsc.
wherein a represents 2′-O-methyl adenosine, c represents 2′-O-methyl cytidine, g represents 2′-O-methyl guanosine, and u represents 2′-O-methyl uridine; Af, represents 2′-fluoro adenosine, Cf represents 2′-fluoro cytidine, Gf represents 2′-fluoro guanosine, and Uf represents 2′-fluoro uridine; cPrpu represents a 5′-cyclopropyl phosphonate-2′-O-methyl uridine; s represents a phosphorothioate linkage; and wherein all or substantially all of the nucleotides on the sense strand are modified nucleotides.

26. The RNAi agent of claim 1, wherein the sense strand comprises, consists of, or consists essentially of a modified nucleotide sequence that differs by 0 or 1 nucleotides from one of the following nucleotide sequences (5′→3′):
(SEQ ID NO: 1057)
usgcuguggUfUfAfuaccuacuaas;
or
(SEQ ID NO: 1046)
gsgacaaggAfAfCfugauuacaaas.
wherein a represents 2′-O-methyl adenosine, c represents 2′-O-methyl cytidine, g represents 2′-O-methyl guanosine, and u represents 2′-O-methyl uridine; Af, represents 2′-fluoro adenosine, Cf represents 2′-fluoro cytidine, Gf represents 2′-fluoro guanosine, and Uf represents 2′-fluoro uridine; s represents a phosphorothioate linkage; and wherein all or substantially all of the nucleotides on the antisense strand are modified nucleotides.

27. The RNAi agent of any one of claims 20-26, wherein the sense strand further includes inverted abasic residues at the 3′ terminal end of the nucleotide sequence, at the 5′ end of the nucleotide sequence, or at both.

28. The RNAi agent of any one of claims 1-27, wherein the RNAi agent is linked to a targeting ligand.

29. The RNAi agent of claim 28, wherein the targeting ligand has affinity for a cell receptor expressed on an epithelial cell.

30. The RNAi agent of claim 29, wherein the targeting ligand comprises an integrin targeting ligand.

31. The RNAi agent of claim 30, wherein the integrin targeting ligand is an αvβ6 integrin targeting ligand.

32. The RNAi agent of claim 31, wherein the targeting ligand comprises the structure: [chemical structure]
or a pharmaceutically acceptable salt thereof, or [chemical structure]
or a pharmaceutically acceptable salt thereof,
wherein [symbol] indicates the point of connection to the RNAi agent.

33. The RNAi agent of any one of claims 28-31, wherein the targeting ligand has a structure selected from the group consisting of [chemical structure] [chemical structure] [chemical structure] [chemical structure] [chemical structure] [chemical structure] [chemical structure] [chemical structure] [chemical structure]
wherein [symbol] indicates the point of connection to the RNAi agent.

34. The RNAi agent of claim 33, wherein RNAi agent is conjugated to a targeting ligand having the following structure:

[chemical structure]

35. The RNAi agent of any one of claims 28-31, wherein the targeting ligand has the following structure:

[chemical structure]

36. The RNAi agent of any one of claims 28-35, wherein the targeting ligand is conjugated to the sense strand.

37. The RNAi agent of claim 36, wherein the targeting ligand is conjugated to the 5′ terminal end of the sense strand.

38. The RNAi agent of claim 37, wherein the RNAi agent is a pharmaceutically acceptable salt.

39. The RNAi agent of claim 38, wherein the RNAi agent is a sodium salt.

40. A composition comprising the RNAi agent of any one of claims 1-39, wherein the composition further comprises a pharmaceutically acceptable excipient.

41. The composition of claim 40, further comprising a second RNAi agent capable of inhibiting the expression of a coronavirus (CoV) genome.

42. The composition of any one of claims 40-41, further comprising one or more additional therapeutics.

43. The composition of any one of claims 40-42, wherein the composition is formulated for administration by inhalation.

44. The composition of claim 43, wherein the composition is delivered by a metered-dose inhaler, jet nebulizer, vibrating mesh nebulizer, or soft mist inhaler.

45. The composition of any of claims 40-44, wherein the RNAi agent is a sodium salt.

46. The composition of any of claims 40-45, wherein the pharmaceutically acceptable excipient is water for injection.

47. The composition of any of claims 40-45, wherein the pharmaceutically acceptable excipient is a buffered saline solution.

48. A method for inhibiting a coronavirus (CoV) genome in a cell, the method comprising introducing into a cell an effective amount of an RNAi agent of any one of claims 1-39 or the composition of any one of claims 40-47.

49. The method of claim 48, wherein the cell is within a subject.

50. The method of claim 49, wherein the subject is a human subject.

51. The method of any one of claims 48-50, wherein following the administration of the RNAi agent the CoV genome expression is inhibited by at least about 30%.

52. A method of treating one or more symptoms or diseases associated with coronavirus (CoV) infection, the method comprising administering to a human subject in need thereof a therapeutically effective amount of the composition of any one of claims 40-47.

53. The method of claim 52, wherein the diseases is a respiratory disease.

54. The method of claim 53, wherein the respiratory disease is pulmonary inflammation.

55. The method of claim 54, wherein the respiratory disease is COVID-19.

56. The method of claim 52, wherein the symptoms are caused by SARS-CoV-2 viral infection.

57. The method of any one of claims 48-56, wherein the RNAi agent is administered at a deposited dose of about 0.01 mg/kg to about 5.0 mg/kg of body weight of the subject.

58. The method of any one of claims 48-57, wherein the RNAi agent is administered at a deposited dose of about 0.03 mg/kg to about 2.0 mg/kg of body weight of the subject.

59. The method of any one of claims 48-58, wherein the RNAi agent is administered in two or more doses.

60. Use of the RNAi agent of any one of claims 1-39, for the treatment of a disease, disorder, or symptom that is caused by coronavirus (CoV) infection, preferably wherein the disease, disorder, or symptom can be mediated at least in part by a reduction in SARS-CoV-2 activity and/or SARS-CoV-2 viral genome expression.

61. Use of the composition according to any one of claims 40-47, for the treatment of a disease, disorder, or symptom that is caused by coronavirus (CoV) infection, preferably wherein the disease, disorder, or symptom can be mediated at least in part by a reduction in SARS-CoV-2 activity and/or SARS-CoV-2 viral genome expression.

62. Use of the composition according to any one of claims 40-47, for the manufacture of a medicament for the treatment of a disease, disorder, or symptom that is caused by coronavirus (CoV) infection, preferably wherein the disease, disorder, or symptom can be mediated at least in part by a reduction in SARS-CoV-2 activity and/or SARS-CoV-2 viral genome expression.

63. The use of any one of claims 60-62, wherein the disease is pulmonary inflammation.

64. A method of making an RNAi agent of any one of claims 1-39, comprising annealing a sense strand and an antisense strand to form a double-stranded ribonucleic acid molecule.

65. The method of claim 64, wherein the sense strand comprises a targeting ligand.

66. The method of claim 65, comprising conjugating a targeting ligand to the sense strand.

The application's sequence listing, which the Patent Office published only in electronic form, follows.

SEQUENCE LISTING (1210 sequences)

SEQ ID NO: 1 - RNA, 29903 nt, Homo sapiens
  source 1..29903: mol_type = genomic RNA
attaaaggtttataccttcccaggtaacaaaccaaccaactttcgatctcttgtagatctgttctctaaacgaactttaaaatctgtgtggctgtcactcggctgcatgcttagtgcactcacgcagtataattaataactaattactgtcgttgacaggacacgagtaactcgtctatcttctgcaggctgcttacggtttcgtccgtgttgcagccgatcatcagcacatctaggtttcgtccgggtgtgaccgaaaggtaagatggagagccttgtccctggtttcaacgagaaaacacacgtccaactcagtttgcctgttttacaggttcgcgacgtgctcgtacgtggctttggagactccgtggaggaggtcttatcagaggcacgtcaacatcttaaagatggcacttgtggcttagtagaagttgaaaaaggcgttttgcctcaacttgaacagccctatgtgttcatcaaacgttcggatgctcgaactgcacctcatggtcatgttatggttgagctggtagcagaactcgaaggcattcagtacggtcgtagtggtgagacacttggtgtccttgtccctcatgtgggcgaaataccagtggcttaccgcaaggttcttcttcgtaagaacggtaataaaggagctggtggccatagttacggcgccgatctaaagtcatttgacttaggcgacgagcttggcactgatccttatgaagattttcaagaaaactggaacactaaacatagcagtggtgttacccgtgaactcatgcgtgagcttaacggaggggcatacactcgctatgtcgataacaacttctgtggccctgatggctaccctcttgagtgcattaaagaccttctagcacgtgctggtaaagcttcatgcactttgtccgaacaactggactttattgacactaagaggggtgtatactgctgccgtgaacatgagcatgaaattgcttggtacacggaacgttctgaaaagagctatgaattgcagacaccttttgaaattaaattggcaaagaaatttgacaccttcaatggggaatgtccaaattttgtatttcccttaaattccataatcaagactattcaaccaagggttgaaaagaaaaagcttgatggctttatgggtagaattcgatctgtctatccagttgcgtcaccaaatgaatgcaaccaaatgtgcctttcaactctcatgaagtgtgatcattgtggtgaaacttcatggcagacgggcgattttgttaaagccacttgcgaattttgtggcactgagaatttgactaaagaaggtgccactacttgtggttacttaccccaaaatgctgttgttaaaatttattgtccagcatgtcacaattcagaagtaggacctgagcatagtcttgccgaataccataatgaatctggcttgaaaaccattcttcgtaagggtggtcgcactattgcctttggaggctgtgtgttctcttatgttggttgccataacaagtgtgcctattgggttccacgtgctagcgctaacataggttgtaaccatacaggtgttgttggagaaggttccgaaggtcttaatgacaaccttcttgaaatactccaaaaagagaaagtcaacatcaatattgttggtgactttaaacttaatgaagagatcgccattattttggcatctttttctgcttccacaagtgcttttgtggaaactgtgaaaggtttggattataaagcattcaaacaaattgttgaatcctgtggtaattttaaagttacaaaaggaaaagctaaaaaaggtgcctggaatattggtgaacagaaatcaatactgagtcctctttatgcatttgcatcagaggctgctcgtgttgtacgatcaattttctcccgcactcttgaaactgctcaaaattctgtgcgtgttttacagaaggccgctataacaatactagatggaatttcacagtattcactgagactcattgatgctatgatgttcacatctgatttggctactaacaatctagttgtaatggcctacattacaggtggtgttgttcagttgacttcgcagtggctaactaacatctttggcactgtttatgaaaaactcaaacccgtccttgattggcttgaagagaagtttaaggaaggtgtagagtttcttagagacggttgggaaattgttaaatttatctcaacctgtgcttgtgaaattgtcggtggacaaattgtcacctgtgcaaaggaaattaaggagagtgttcagacattctttaagcttgtaaataaatttttggctttgtgtgctgactctatcattattggtggagctaaacttaaagccttgaatttaggtgaaacatttgtcacgcactcaaagggattgtacagaaagtgtgttaaatccagagaagaaactggcctactcatgcctctaaaagccccaaaagaaattatcttcttagagggagaaacacttcccacagaagtgttaacagaggaagttgtcttgaaaactggtgatttacaaccattagaacaacctactagtgaagctgttgaagctccattggttggtacaccagtttgtattaacgggcttatgttgctcgaaatcaaagacacagaaaagtactgtgcccttgcacctaatatgatggtaacaaacaataccttcacactcaaaggcggtgcaccaacaaaggttacttttggtgatgacactgtgatagaagtgcaaggttacaagagtgtgaatatcacttttgaacttgatgaaaggattgataaagtacttaatgagaagtgctctgcctatacagttgaactcggtacagaagtaaatgagttcgcctgtgttgtggcagatgctgtcataaaaactttgcaaccagtatctgaattacttacaccactgggcattgatttagatgagtggagtatggctacatactacttatttgatgagtctggtgagtttaaattggcttcacatatgtattgttctttctaccctccagatgaggatgaagaagaaggtgattgtgaagaagaagagtttgagccatcaactcaatatgagtatggtactgaagatgattaccaaggtaaacctttggaatttggtgccacttctgctgctcttcaacctgaagaagagcaagaagaagattggttagatgatgatagtcaacaaactgttggtcaacaagacggcagtgaggacaatcagacaactactattcaaacaattgttgaggttcaacctcaattagagatggaacttacaccagttgttcagactattgaagtgaatagttttagtggttatttaaaacttactgacaatgtatacattaaaaatgcagacattgtggaagaagctaaaaaggtaaaaccaacagtggttgttaatgcagccaatgtttaccttaaacatggaggaggtgttgcaggagccttaaataaggctactaacaatgccatgcaagttgaatctgatgattacatagctactaatggaccacttaaagtgggtggtagttgtgttttaagcggacacaatcttgctaaacactgtcttcatgttgtcggcccaaatgttaacaaaggtgaagacattcaacttcttaagagtgcttatgaaaattttaatcagcacgaagttctacttgcaccattattatcagctggtatttttggtgctgaccctatacattctttaagagtttgtgtagatactgttcgcacaaatgtctacttagctgtctttgataaaaatctctatgacaaacttgtttcaagctttttggaaatgaagagtgaaaagcaagttgaacaaaagatcgctgagattcctaaagaggaagttaagccatttataactgaaagtaaaccttcagttgaacagagaaaacaagatgataagaaaatcaaagcttgtgttgaagaagttacaacaactctggaagaaactaagttcctcacagaaaacttgttactttatattgacattaatggcaatcttcatccagattctgccactcttgttagtgacattgacatcactttcttaaagaaagatgctccatatatagtgggtgatgttgttcaagagggtgttttaactgctgtggttatacctactaaaaaggctggtggcactactgaaatgctagcgaaagctttgagaaaagtgccaacagacaattatataaccacttacccgggtcagggtttaaatggttacactgtagaggaggcaaagacagtgcttaaaaagtgtaaaagtgccttttacattctaccatctattatctctaatgagaagcaagaaattcttggaactgtttcttggaatttgcgagaaatgcttgcacatgcagaagaaacacgcaaattaatgcctgtctgtgtggaaactaaagccatagtttcaactatacagcgtaaatataagggtattaaaatacaagagggtgtggttgattatggtgctagattttacttttacaccagtaaaacaactgtagcgtcacttatcaacacacttaacgatctaaatgaaactcttgttacaatgccacttggctatgtaacacatggcttaaatttggaagaagctgctcggtatatgagatctctcaaagtgccagctacagtttctgtttcttcacctgatgctgttacagcgtataatggttatcttacttcttcttctaaaacacctgaagaacattttattgaaaccatctcacttgctggttcctataaagattggtcctattctggacaatctacacaactaggtatagaatttcttaagagaggtgataaaagtgtatattacactagtaatcctaccacattccacctagatggtgaagttatcacctttgacaatcttaagacacttctttctttgagagaagtgaggactattaaggtgtttacaacagtagacaacattaacctccacacgcaagttgtggacatgtcaatgacatatggacaacagtttggtccaacttatttggatggagctgatgttactaaaataaaacctcataattcacatgaaggtaaaacattttatgttttacctaatgatgacactctacgtgttgaggcttttgagtactaccacacaactgatcctagttttctgggtaggtacatgtcagcattaaatcacactaaaaagtggaaatacccacaagttaatggtttaacttctattaaatgggcagataacaactgttatcttgccactgcattgttaacactccaacaaatagagttgaagtttaatccacctgctctacaagatgcttattacagagcaagggctggtgaagctgctaacttttgtgcacttatcttagcctactgtaataagacagtaggtgagttaggtgatgttagagaaacaatgagttacttgtttcaacatgccaatttagattcttgcaaaagagtcttgaacgtggtgtgtaaaacttgtggacaacagcagacaacccttaagggtgtagaagctgttatgtacatgggcacactttcttatgaacaatttaagaaaggtgttcagataccttgtacgtgtggtaaacaagctacaaaatatctagtacaacaggagtcaccttttgttatgatgtcagcaccacctgctcagtatgaacttaagcatggtacatttacttgtgctagtgagtacactggtaattaccagtgtggtcactataaacatataacttctaaagaaactttgtattgcatagacggtgctttacttacaaagtcctcagaatacaaaggtcctattacggatgttttctacaaagaaaacagttacacaacaaccataaaaccagttacttataaattggatggtgttgtttgtacagaaattgaccctaagttggacaattattataagaaagacaattcttatttcacagagcaaccaattgatcttgtaccaaaccaaccatatccaaacgcaagcttcgataattttaagtttgtatgtgataatatcaaatttgctgatgatttaaaccagttaactggttataagaaacctgcttcaagagagcttaaagttacatttttccctgacttaaatggtgatgtggtggctattgattataaacactacacaccctcttttaagaaaggagctaaattgttacataaacctattgtttggcatgttaacaatgcaactaataaagccacgtataaaccaaatacctggtgtatacgttgtctttggagcacaaaaccagttgaaacatcaaattcgtttgatgtactgaagtcagaggacgcgcagggaatggataatcttgcctgcgaagatctaaaaccagtctctgaagaagtagtggaaaatcctaccatacagaaagacgttcttgagtgtaatgtgaaaactaccgaagttgtaggagacattatacttaaaccagcaaataatagtttaaaaattacagaagaggttggccacacagatctaatggctgcttatgtagacaattctagtcttactattaagaaacctaatgaattatctagagtattaggtttgaaaacccttgctactcatggtttagctgctgttaatagtgtcccttgggatactatagctaattatgctaagccttttcttaacaaagttgttagtacaactactaacatagttacacggtgtttaaaccgtgtttgtactaattatatgccttatttctttactttattgctacaattgtgtacttttactagaagtacaaattctagaattaaagcatctatgccgactactatagcaaagaatactgttaagagtgtcggtaaattttgtctagaggcttcatttaattatttgaagtcacctaatttttctaaactgataaatattataatttggtttttactattaagtgtttgcctaggttctttaatctactcaaccgctgctttaggtgttttaatgtctaatttaggcatgccttcttactgtactggttacagagaaggctatttgaactctactaatgtcactattgcaacctactgtactggttctataccttgtagtgtttgtcttagtggtttagattctttagacacctatccttctttagaaactatacaaattaccatttcatcttttaaatgggatttaactgcttttggcttagttgcagagtggtttttggcatatattcttttcactaggtttttctatgtacttggattggctgcaatcatgcaattgtttttcagctattttgcagtacattttattagtaattcttggcttatgtggttaataattaatcttgtacaaatggccccgatttcagctatggttagaatgtacatcttctttgcatcattttattatgtatggaaaagttatgtgcatgttgtagacggttgtaattcatcaacttgtatgatgtgttacaaacgtaatagagcaacaagagtcgaatgtacaactattgttaatggtgttagaaggtccttttatgtctatgctaatggaggtaaaggcttttgcaaactacacaattggaattgtgttaattgtgatacattctgtgctggtagtacatttattagtgatgaagttgcgagagacttgtcactacagtttaaaagaccaataaatcctactgaccagtcttcttacatcgttgatagtgttacagtgaagaatggttccatccatctttactttgataaagctggtcaaaagacttatgaaagacattctctctctcattttgttaacttagacaacctgagagctaataacactaaaggttcattgcctattaatgttatagtttttgatggtaaatcaaaatgtgaagaatcatctgcaaaatcagcgtctgtttactacagtcagcttatgtgtcaacctatactgttactagatcaggcattagtgtctgatgttggtgatagtgcggaagttgcagttaaaatgtttgatgcttacgttaatacgttttcatcaacttttaacgtaccaatggaaaaactcaaaacactagttgcaactgcagaagctgaacttgcaaagaatgtgtccttagacaatgtcttatctacttttatttcagcagctcggcaagggtttgttgattcagatgtagaaactaaagatgttgttgaatgtcttaaattgtcacatcaatctgacatagaagttactggcgatagttgtaataactatatgctcacctataacaaagttgaaaacatgacaccccgtgaccttggtgcttgtattgactgtagtgcgcgtcatattaatgcgcaggtagcaaaaagtcacaacattgctttgatatggaacgttaaagatttcatgtcattgtctgaacaactacgaaaacaaatacgtagtgctgctaaaaagaataacttaccttttaagttgacatgtgcaactactagacaagttgttaatgttgtaacaacaaagatagcacttaagggtggtaaaattgttaataattggttgaagcagttaattaaagttacacttgtgttcctttttgttgctgctattttctatttaataacacctgttcatgtcatgtctaaacatactgacttttcaagtgaaatcataggatacaaggctattgatggtggtgtcactcgtgacatagcatctacagatacttgttttgctaacaaacatgctgattttgacacatggtttagccagcgtggtggtagttatactaatgacaaagcttgcccattgattgctgcagtcataacaagagaagtgggttttgtcgtgcctggtttgcctggcacgatattacgcacaactaatggtgactttttgcatttcttacctagagtttttagtgcagttggtaacatctgttacacaccatcaaaacttatagagtacactgactttgcaacatcagcttgtgttttggctgctgaatgtacaatttttaaagatgcttctggtaagccagtaccatattgttatgataccaatgtactagaaggttctgttgcttatgaaagtttacgccctgacacacgttatgtgctcatggatggctctattattcaatttcctaacacctaccttgaaggttctgttagagtggtaacaacttttgattctgagtactgtaggcacggcacttgtgaaagatcagaagctggtgtttgtgtatctactagtggtagatgggtacttaacaatgattattacagatctttaccaggagttttctgtggtgtagatgctgtaaatttacttactaatatgtttacaccactaattcaacctattggtgctttggacatatcagcatctatagtagctggtggtattgtagctatcgtagtaacatgccttgcctactattttatgaggtttagaagagcttttggtgaatacagtcatgtagttgcctttaatactttactattccttatgtcattcactgtactctgtttaacaccagtttactcattcttacctggtgtttattctgttatttacttgtacttgacattttatcttactaatgatgtttcttttttagcacatattcagtggatggttatgttcacacctttagtacctttctggataacaattgcttatatcatttgtatttccacaaagcatttctattggttctttagtaattacctaaagagacgtgtagtctttaatggtgtttcctttagtacttttgaagaagctgcgctgtgcacctttttgttaaataaagaaatgtatctaaagttgcgtagtgatgtgctattacctcttacgcaatataatagatacttagctctttataataagtacaagtattttagtggagcaatggatacaactagctacagagaagctgcttgttgtcatctcgcaaaggctctcaatgacttcagtaactcaggttctgatgttctttaccaaccaccacaaacctctatcacctcagctgttttgcagagtggttttagaaaaatggcattcccatctggtaaagttgagggttgtatggtacaagtaacttgtggtacaactacacttaacggtctttggcttgatgacgtagtttactgtccaagacatgtgatctgcacctctgaagacatgcttaaccctaattatgaagatttactcattcgtaagtctaatcataatttcttggtacaggctggtaatgttcaactcagggttattggacattctatgcaaaattgtgtacttaagcttaaggttgatacagccaatcctaagacacctaagtataagtttgttcgcattcaaccaggacagactttttcagtgttagcttgttacaatggttcaccatctggtgtttaccaatgtgctatgaggcccaatttcactattaagggttcattccttaatggttcatgtggtagtgttggttttaacatagattatgactgtgtctctttttgttacatgcaccatatggaattaccaactggagttcatgctggcacagacttagaaggtaacttttatggaccttttgttgacaggcaaacagcacaagcagctggtacggacacaactattacagttaatgttttagcttggttgtacgctgctgttataaatggagacaggtggtttctcaatcgatttaccacaactcttaatgactttaaccttgtggctatgaagtacaattatgaacctctaacacaagaccatgttgacatactaggacctctttctgctcaaactggaattgccgttttagatatgtgtgcttcattaaaagaattactgcaaaatggtatgaatggacgtaccatattgggtagtgctttattagaagatgaatttacaccttttgatgttgttagacaatgctcaggtgttactttccaaagtgcagtgaaaagaacaatcaagggtacacaccactggttgttactcacaattttgacttcacttttagttttagtccagagtactcaatggtctttgttcttttttttgtatgaaaatgcctttttaccttttgctatgggtattattgctatgtctgcttttgcaatgatgtttgtcaaacataagcatgcatttctctgtttgtttttgttaccttctcttgccactgtagcttattttaatatggtctatatgcctgctagttgggtgatgcgtattatgacatggttggatatggttgatactagtttgtctggttttaagctaaaagactgtgttatgtatgcatcagctgtagtgttactaatccttatgacagcaagaactgtgtatgatgatggtgctaggagagtgtggacacttatgaatgtcttgacactcgtttataaagtttattatggtaatgctttagatcaagccatttccatgtgggctcttataatctctgttacttctaactactcaggtgtagttacaactgtcatgtttttggccagaggtattgtttttatgtgtgttgagtattgccctattttcttcataactggtaatacacttcagtgtataatgctagtttattgtttcttaggctatttttgtacttgttactttggcctcttttgtttactcaaccgctactttagactgactcttggtgtttatgattacttagtttctacacaggagtttagatatatgaattcacagggactactcccacccaagaatagcatagatgccttcaaactcaacattaaattgttgggtgttggtggcaaaccttgtatcaaagtagccactgtacagtctaaaatgtcagatgtaaagtgcacatcagtagtcttactctcagttttgcaacaactcagagtagaatcatcatctaaattgtgggctcaatgtgtccagttacacaatgacattctcttagctaaagatactactgaagcctttgaaaaaatggtttcactactttctgttttgctttccatgcagggtgctgtagacataaacaagctttgtgaagaaatgctggacaacagggcaaccttacaagctatagcctcagagtttagttcccttccatcatatgcagcttttgctactgctcaagaagcttatgagcaggctgttgctaatggtgattctgaagttgttcttaaaaagttgaagaagtctttgaatgtggctaaatctgaatttgaccgtgatgcagccatgcaacgtaagttggaaaagatggctgatcaagctatgacccaaatgtataaacaggctagatctgaggacaagagggcaaaagttactagtgctatgcagacaatgcttttcactatgcttagaaagttggataatgatgcactcaacaacattatcaacaatgcaagagatggttgtgttcccttgaacataatacctcttacaacagcagccaaactaatggttgtcataccagactataacacatataaaaatacgtgtgatggtacaacatttacttatgcatcagcattgtgggaaatccaacaggttgtagatgcagatagtaaaattgttcaacttagtgaaattagtatggacaattcacctaatttagcatggcctcttattgtaacagctttaagggccaattctgctgtcaaattacagaataatgagcttagtcctgttgcactacgacagatgtcttgtgctgccggtactacacaaactgcttgcactgatgacaatgcgttagcttactacaacacaacaaagggaggtaggtttgtacttgcactgttatccgatttacaggatttgaaatgggctagattccctaagagtgatggaactggtactatctatacagaactggaaccaccttgtaggtttgttacagacacacctaaaggtcctaaagtgaagtatttatactttattaaaggattaaacaacctaaatagaggtatggtacttggtagtttagctgccacagtacgtctacaagctggtaatgcaacagaagtgcctgccaattcaactgtattatctttctgtgcttttgctgtagatgctgctaaagcttacaaagattatctagctagtgggggacaaccaatcactaattgtgttaagatgttgtgtacacacactggtactggtcaggcaataacagttacaccggaagccaatatggatcaagaatcctttggtggtgcatcgtgttgtctgtactgccgttgccacatagatcatccaaatcctaaaggattttgtgacttaaaaggtaagtatgtacaaatacctacaacttgtgctaatgaccctgtgggttttacacttaaaaacacagtctgtaccgtctgcggtatgtggaaaggttatggctgtagttgtgatcaactccgcgaacccatgcttcagtcagctgatgcacaatcgtttttaaacgggtttgcggtgtaagtgcagcccgtcttacaccgtgcggcacaggcactagtactgatgtcgtatacagggcttttgacatctacaatgataaagtagctggttttgctaaattcctaaaaactaattgttgtcgcttccaagaaaaggacgaagatgacaatttaattgattcttactttgtagttaagagacacactttctctaactaccaacatgaagaaacaatttataatttacttaaggattgtccagctgttgctaaacatgacttctttaagtttagaatagacggtgacatggtaccacatatatcacgtcaacgtcttactaaatacacaatggcagacctcgtctatgctttaaggcattttgatgaaggtaattgtgacacattaaaagaaatacttgtcacatacaattgttgtgatgatgattatttcaataaaaaggactggtatgattttgtagaaaacccagatatattacgcgtatacgccaacttaggtgaacgtgtacgccaagctttgttaaaaacagtacaattctgtgatgccatgcgaaatgctggtattgttggtgtactgacattagataatcaagatctcaatggtaactggtatgatttcggtgatttcatacaaaccacgccaggtagtggagttcctgttgtagattcttattattcattgttaatgcctatattaaccttgaccagggctttaactgcagagtcacatgttgacactgacttaacaaagccttacattaagtgggatttgttaaaatatgacttcacggaagagaggttaaaactctttgaccgttattttaaatattgggatcagacataccacccaaattgtgttaactgtttggatgacagatgcattctgcattgtgcaaactttaatgttttattctctacagtgttcccacctacaagttttggaccactagtgagaaaaatatttgttgatggtgttccatttgtagtttcaactggataccacttcagagagctaggtgttgtacataatcaggatgtaaacttacatagctctagacttagttttaaggaattacttgtgtatgctgctgaccctgctatgcacgctgcttctggtaatctattactagataaacgcactacgtgcttttcagtagctgcacttactaacaatgttgcttttcaaactgtcaaacccggtaattttaacaaagacttctatgactttgctgtgtctaagggtttctttaaggaaggaagttctgttgaattaaaacacttcttctttgctcaggatggtaatgctgctatcagcgattatgactactatcgttataatctaccaacaatgtgtgatatcagacaactactatttgtagttgaagttgttgataagtactttgattgttacgatggtggctgtattaatgctaaccaagtcatcgtcaacaacctagacaaatcagctggttttccatttaataaatggggtaaggctagactttattatgattcaatgagttatgaggatcaagatgcacttttcgcatatacaaaacgtaatgtcatccctactataactcaaatgaatcttaagtatgccattagtgcaaagaatagagctcgcaccgtagctggtgtctctatctgtagtactatgaccaatagacagtttcatcaaaaattattgaaatcaatagccgccactagaggagctactgtagtaattggaacaagcaaattctatggtggttggcacaacatgttaaaaactgtttatagtgatgtagaaaaccctcaccttatgggttgggattatcctaaatgtgatagagccatgcctaacatgcttagaattatggcctcacttgttcttgctcgcaaacatacaacgtgttgtagcttgtcacaccgtttctatagattagctaatgagtgtgctcaagtattgagtgaaatggtcatgtgtggcggttcactatatgttaaaccaggtggaacctcatcaggagatgccacaactgcttatgctaatagtgtttttaacatttgtcaagctgtcacggccaatgttaatgcacttttatctactgatggtaacaaaattgccgataagtatgtccgcaatttacaacacagactttatgagtgtctctatagaaatagagatgttgacacagactttgtgaatgagttttacgcatatttgcgtaaacatttctcaatgatgatactctctgacgatgctgttgtgtgtttcaatagcacttatgcatctcaaggtctagtggctagcataaagaactttaagtcagttctttattatcaaaacaatgtttttatgtctgaagcaaaatgttggactgagactgaccttactaaaggacctcatgaattttgctctcaacatacaatgctagttaaacagggtgatgattatgtgtaccttccttacccagatccatcaagaatcctaggggccggctgttttgtagatgatatcgtaaaaacagatggtacacttatgattgaacggttcgtgtctttagctatagatgcttacccacttactaaacatcctaatcaggagtatgctgatgtctttcatttgtacttacaatacataagaaagctacatgatgagttaacaggacacatgttagacatgtattctgttatgcttactaatgataacacttcaaggtattgggaacctgagttttatgaggctatgtacacaccgcatacagtcttacaggctgttggggcttgtgttctttgcaattcacagacttcattaagatgtggtgcttgcatacgtagaccattcttatgttgtaaatgctgttacgaccatgtcatatcaacatcacataaattagtcttgtctgttaatccgtatgtttgcaatgctccaggttgtgatgtcacagatgtgactcaactttacttaggaggtatgagctattattgtaaatcacataaaccacccattagttttccattgtgtgctaatggacaagtttttggtttatataaaaatacatgtgttggtagcgataatgttactgactttaatgcaattgcaacatgtgactggacaaatgctggtgattacattttagctaacacctgtactgaaagactcaagctttttgcagcagaaacgctcaaagctactgaggagacatttaaactgtcttatggtattgctactgtacgtgaagtgctgtctgacagagaattacatctttcatgggaagttggtaaacctagaccaccacttaaccgaaattatgtctttactggttatcgtgtaactaaaaacagtaaagtacaaataggagagtacacctttgaaaaaggtgactatggtgatgctgttgtttaccgaggtacaacaacttacaaattaaatgttggtgattattttgtgctgacatcacatacagtaatgccattaagtgcacctacactagtgccacaagagcactatgttagaattactggcttatacccaacactcaatatctcagatgagttttctagcaatgttgcaaattatcaaaaggttggtatgcaaaagtattctacactccagggaccacctggtactggtaagagtcattttgctattggcctagctctctactacccttctgctcgcatagtgtatacagcttgctctcatgccgctgttgatgcactatgtgagaaggcattaaaatatttgcctatagataaatgtagtagaattatacctgcacgtgctcgtgtagagtgttttgataaattcaaagtgaattcaacattagaacagtatgtcttttgtactgtaaatgcattgcctgagacgacagcagatatagttgtctttgatgaaatttcaatggccacaaattatgatttgagtgttgtcaatgccagattacgtgctaagcactatgtgtacattggcgaccctgctcaattacctgcaccacgcacattgctaactaagggcacactagaaccagaatatttcaattcagtgtgtagacttatgaaaactataggtccagacatgttcctcggaacttgtcggcgttgtcctgctgaaattgttgacactgtgagtgctttggtttatgataataagcttaaagcacataaagacaaatcagctcaatgctttaaaatgttttataagggtgttatcacgcatgatgtttcatctgcaattaacaggccacaaataggcgtggtaagagaattccttacacgtaaccctgcttggagaaaagctgtctttatttcaccttataattcacagaatgctgtagcctcaaagattttgggactaccaactcaaactgttgattcatcacagggctcagaatatgactatgtcatattcactcaaaccactgaaacagctcactcttgtaatgtaaacagatttaatgttgctattaccagagcaaaagtaggcatactttgcataatgtctgatagagacctttatgacaagttgcaatttacaagtcttgaaattccacgtaggaatgtggcaactttacaagctgaaaatgtaacaggactctttaaagattgtagtaaggtaatcactgggttacatcctacacaggcacctacacacctcagtgttgacactaaattcaaaactgaaggtttatgtgttgacatacctggcatacctaaggacatgacctatagaagactcatctctatgatgggttttaaaatgaattatcaagttaatggttaccctaacatgtttatcacccgcgaagaagctataagacatgtacgtgcatggattggcttcgatgtcgaggggtgtcatgctactagagaagctgttggtaccaatttacctttacagctaggtttttctacaggtgttaacctagttgctgtacctacaggttatgttgatacacctaataatacagatttttccagagttagtgctaaaccaccgcctggagatcaatttaaacacctcataccacttatgtacaaaggacttccttggaatgtagtgcgtataaagattgtacaaatgttaagtgacacacttaaaaatctctctgacagagtcgtatttgtcttatgggcacatggctttgagttgacatctatgaagtattttgtgaaaataggacctgagcgcacctgttgtctatgtgatagacgtgccacatgcttttccactgcttcagacacttatgcctgttggcatcattctattggatttgattacgtctataatccgtttatgattgatgttcaacaatggggttttacaggtaacctacaaagcaaccatgatctgtattgtcaagtccatggtaatgcacatgtagctagttgtgatgcaatcatgactaggtgtctagctgtccacgagtgctttgttaagcgtgttgactggactattgaatatcctataattggtgatgaactgaagattaatgcggcttgtagaaaggttcaacacatggttgttaaagctgcattattagcagacaaattcccagttcttcacgacattggtaaccctaaagctattaagtgtgtacctcaagctgatgtagaatggaagttctatgatgcacagccttgtagtgacaaagcttataaaatagaagaattattctattcttatgccacacattctgacaaattcacagatggtgtatgcctattttggaattgcaatgtcgatagatatcctgctaattccattgtttgtagatttgacactagagtgctatctaaccttaacttgcctggttgtgatggtggcagtttgtatgtaaataaacatgcattccacacaccagcttttgataaaagtgcttttgttaatttaaaacaattaccatttttctattactctgacagtccatgtgagtctcatggaaaacaagtagtgtcagatatagattatgtaccactaaagtctgctacgtgtataacacgttgcaatttaggtggtgctgtctgtagacatcatgctaatgagtacagattgtatctcgatgcttataacatgatgatctcagctggctttagcttgtgggtttacaaacaatttgatacttataacctctggaacacttttacaagacttcagagtttagaaaatgtggcttttaatgttgtaaataagggacactttgatggacaacagggtgaagtaccagtttctatcattaataacactgtttacacaaaagttgatggtgttgatgtagaattgtttgaaaataaaacaacattacctgttaatgtagcatttgagctttgggctaagcgcaacattaaaccagtaccagaggtgaaaatactcaataatttgggtgtggacattgctgctaatactgtgatctgggactacaaaagagatgctccagcacatatatctactattggtgtttgttctatgactgacatagccaagaaaccaactgaaacgatttgtgcaccactcactgtcttttttgatggtagagttgatggtcaagtagacttatttagaaatgcccgtaatggtgttcttattacagaaggtagtgttaaaggtttacaaccatctgtaggtcccaaacaagctagtcttaatggagtcacattaattggagaagccgtaaaaacacagttcaattattataagaaagttgatggtgttgtccaacaattacctgaaacttactttactcagagtagaaatttacaagaatttaaacccaggagtcaaatggaaattgatttcttagaattagctatggatgaattcattgaacggtataaattagaaggctatgccttcgaacatatcgtttatggagattttagtcatagtcagttaggtggtttacatctactgattggactagctaaacgttttaaggaatcaccttttgaattagaagattttattcctatggacagtacagttaaaaactatttcataacagatgcgcaaacaggttcatctaagtgtgtgtgttctgttattgatttattacttgatgattttgttgaaataataaaatcccaagatttatctgtagtttctaaggttgtcaaagtgactattgactatacagaaatttcatttatgctttggtgtaaagatggccatgtagaaacattttacccaaaattacaatctagtcaagcgtggcaaccgggtgttgctatgcctaatctttacaaaatgcaaagaatgctattagaaaagtgtgaccttcaaaattatggtgatagtgcaacattacctaaaggcataatgatgaatgtcgcaaaatatactcaactgtgtcaatatttaaacacattaacattagctgtaccctataatatgagagttatacattttggtgctggttctgataaaggagttgcaccaggtacagctgttttaagacagtggttgcctacgggtacgctgcttgtcgattcagatcttaatgactttgtctctgatgcagattcaactttgattggtgattgtgcaactgtacatacagctaataaatgggatctcattattagtgatatgtacgaccctaagactaaaaatgttacaaaagaaaatgactctaaagagggttttttcacttacatttgtgggtttatacaacaaaagctagctcttggaggttccgtggctataaagataacagaacattcttggaatgctgatctttataagctcatgggacacttcgcatggtggacagcctttgttactaatgtgaatgcgtcatcatctgaagcatttttaattggatgtaattatcttggcaaaccacgcgaacaaatagatggttatgtcatgcatgcaaattacatattttggaggaatacaaatccaattcagttgtcttcctattctttatttgacatgagtaaatttccccttaaattaaggggtactgctgttatgtctttaaaagaaggtcaaatcaatgatatgattttatctcttcttagtaaaggtagacttataattagagaaaacaacagagttgttatttctagtgatgttcttgttaacaactaaacgaacaatgtttgtttttcttgttttattgccactagtctctagtcagtgtgttaatcttacaaccagaactcaattaccccctgcatacactaattctttcacacgtggtgtttattaccctgacaaagttttcagatcctcagttttacattcaactcaggacttgttcttacctttcttttccaatgttacttggttccatgctatacatgtctctgggaccaatggtactaagaggtttgataaccctgtcctaccatttaatgatggtgtttattttgcttccactgagaagtctaacataataagaggctggatttttggtactactttagattcgaagacccagtccctacttattgttaataacgctactaatgttgttattaaagtctgtgaatttcaattttgtaatgatccatttttgggtgtttattaccacaaaaacaacaaaagttggatggaaagtgagttcagagtttattctagtgcgaataattgcacttttgaatatgtctctcagccttttcttatggaccttgaaggaaaacagggtaatttcaaaaatcttagggaatttgtgtttaagaatattgatggttattttaaaatatattctaagcacacgcctattaatttagtgcgtgatctccctcagggtttttcggctttagaaccattggtagatttgccaataggtattaacatcactaggtttcaaactttacttgctttacatagaagttatttgactcctggtgattcttcttcaggttggacagctggtgctgcagcttattatgtgggttatcttcaacctaggacttttctattaaaatataatgaaaatggaaccattacagatgctgtagactgtgcacttgaccctctctcagaaacaaagtgtacgttgaaatccttcactgtagaaaaaggaatctatcaaacttctaactttagagtccaaccaacagaatctattgttagatttcctaatattacaaacttgtgcccttttggtgaagtttttaacgccaccagatttgcatctgtttatgcttggaacaggaagagaatcagcaactgtgttgctgattattctgtcctatataattccgcatcattttccacttttaagtgttatggagtgtctcctactaaattaaatgatctctgctttactaatgtctatgcagattcatttgtaattagaggtgatgaagtcagacaaatcgctccagggcaaactggaaagattgctgattataattataaattaccagatgattttacaggctgcgttatagcttggaattctaacaatcttgattctaaggttggtggtaattataattacctgtatagattgtttaggaagtctaatctcaaaccttttgagagagatatttcaactgaaatctatcaggccggtagcacaccttgtaatggtgttgaaggttttaattgttactttcctttacaatcatatggtttccaacccactaatggtgttggttaccaaccatacagagtagtagtactttcttttgaacttctacatgcaccagcaactgtttgtggacctaaaaagtctactaatttggttaaaaacaaatgtgtcaatttcaacttcaatggtttaacaggcacaggtgttcttactgagtctaacaaaaagtttctgcctttccaacaatttggcagagacattgctgacactactgatgctgtccgtgatccacagacacttgagattcttgacattacaccatgttcttttggtggtgtcagtgttataacaccaggaacaaatacttctaaccaggttgctgttctttatcaggatgttaactgcacagaagtccctgttgctattcatgcagatcaacttactcctacttggcgtgtttattctacaggttctaatgtttttcaaacacgtgcaggctgtttaataggggctgaacatgtcaacaactcatatgagtgtgacatacccattggtgcaggtatatgcgctagttatcagactcagactaattctcctcggcgggcacgtagtgtagctagtcaatccatcattgcctacactatgtcacttggtgcagaaaattcagttgcttactctaataactctattgccatacccacaaattttactattagtgttaccacagaaattctaccagtgtctatgaccaagacatcagtagattgtacaatgtacatttgtggtgattcaactgaatgcagcaatcttttgttgcaatatggcagtttttgtacacaattaaaccgtgctttaactggaatagctgttgaacaagacaaaaacacccaagaagtttttgcacaagtcaaacaaatttacaaaacaccaccaattaaagattttggtggttttaatttttcacaaatattaccagatccatcaaaaccaagcaagaggtcatttattgaagatctacttttcaacaaagtgacacttgcagatgctggcttcatcaaacaatatggtgattgccttggtgatattgctgctagagacctcatttgtgcacaaaagtttaacggccttactgttttgccacctttgctcacagatgaaatgattgctcaatacacttctgcactgttagcgggtacaatcacttctggttggacctttggtgcaggtgctgcattacaaataccatttgctatgcaaatggcttataggtttaatggtattggagttacacagaatgttctctatgagaaccaaaaattgattgccaaccaatttaatagtgctattggcaaaattcaagactcactttcttccacagcaagtgcacttggaaaacttcaagatgtggtcaaccaaaatgcacaagctttaaacacgcttgttaaacaacttagctccaattttggtgcaatttcaagtgttttaaatgatatcctttcacgtcttgacaaagttgaggctgaagtgcaaattgataggttgatcacaggcagacttcaaagtttgcagacatatgtgactcaacaattaattagagctgcagaaatcagagcttctgctaatcttgctgctactaaaatgtcagagtgtgtacttggacaatcaaaaagagttgatttttgtggaaagggctatcatcttatgtccttccctcagtcagcacctcatggtgtagtcttcttgcatgtgacttatgtccctgcacaagaaaagaacttcacaactgctcctgccatttgtcatgatggaaaagcacactttcctcgtgaaggtgtctttgtttcaaatggcacacactggtttgtaacacaaaggaatttttatgaaccacaaatcattactacagacaacacatttgtgtctggtaactgtgatgttgtaataggaattgtcaacaacacagtttatgatcctttgcaacctgaattagactcattcaaggaggagttagataaatattttaagaatcatacatcaccagatgttgatttaggtgacatctctggcattaatgcttcagttgtaaacattcaaaaagaaattgaccgcctcaatgaggttgccaagaatttaaatgaatctctcatcgatctccaagaacttggaaagtatgagcagtatataaaatggccatggtacatttggctaggttttatagctggcttgattgccatagtaatggtgacaattatgctttgctgtatgaccagttgctgtagttgtctcaagggctgttgttcttgtggatcctgctgcaaatttgatgaagacgactctgagccagtgctcaaaggagtcaaattacattacacataaacgaacttatggatttgtttatgagaatcttcacaattggaactgtaactttgaagcaaggtgaaatcaaggatgctactccttcagattttgttcgcgctactgcaacgataccgatacaagcctcactccctttcggatggcttattgttggcgttgcacttcttgctgtttttcagagcgcttccaaaatcataaccctcaaaaagagatggcaactagcactctccaagggtgttcactttgtttgcaacttgctgttgttgtttgtaacagtttactcacaccttttgctcgttgctgctggccttgaagccccttttctctatctttatgctttagtctacttcttgcagagtataaactttgtaagaataataatgaggctttggctttgctggaaatgccgttccaaaaacccattactttatgatgccaactattttctttgctggcatactaattgttacgactattgtataccttacaatagtgtaacttcttcaattgtcattacttcaggtgatggcacaacaagtcctatttctgaacatgactaccagattggtggttatactgaaaaatgggaatctggagtaaaagactgtgttgtattacacagttacttcacttcagactattaccagctgtactcaactcaattgagtacagacactggtgttgaacatgttaccttcttcatctacaataaaattgttgatgagcctgaagaacatgtccaaattcacacaatcgacggttcatccggagttgttaatccagtaatggaaccaatttatgatgaaccgacgacgactactagcgtgcctttgtaagcacaagctgatgagtacgaacttatgtactcattcgtttcggaagagacaggtacgttaatagttaatagcgtacttctttttcttgctttcgtggtattcttgctagttacactagccatccttactgcgcttcgattgtgtgcgtactgctgcaatattgttaacgtgagtcttgtaaaaccttctttttacgtttactctcgtgttaaaaatctgaattcttctagagttcctgatcttctggtctaaacgaactaaatattatattagtttttctgtttggaactttaattttagccatggcagattccaacggtactattaccgttgaagagcttaaaaagctccttgaacaatggaacctagtaataggtttcctattccttacatggatttgtcttctacaatttgcctatgccaacaggaataggtttttgtatataattaagttaattttcctctggctgttatggccagtaactttagcttgttttgtgcttgctgctgtttacagaataaattggatcaccggtggaattgctatcgcaatggcttgtcttgtaggcttgatgtggctcagctacttcattgcttctttcagactgtttgcgcgtacgcgttccatgtggtcattcaatccagaaactaacattcttctcaacgtgccactccatggcactattctgaccagaccgcttctagaaagtgaactcgtaatcggagctgtgatccttcgtggacatcttcgtattgctggacaccatctaggacgctgtgacatcaaggacctgcctaaagaaatcactgttgctacatcacgaacgctttcttattacaaattgggagcttcgcagcgtgtagcaggtgactcaggttttgctgcatacagtcgctacaggattggcaactataaattaaacacagaccattccagtagcagtgacaatattgctttgcttgtacagtaagtgacaacagatgtttcatctcgttgactttcaggttactatagcagagatattactaattattatgaggacttttaaagtttccatttggaatcttgattacatcataaacctcataattaaaaatttatctaagtcactaactgagaataaatattctcaattagatgaagagcaaccaatggagattgattaaacgaacatgaaaattattcttttcttggcactgataacactcgctacttgtgagctttatcactaccaagagtgtgttagaggtacaacagtacttttaaaagaaccttgctcttctggaacatacgagggcaattcaccatttcatcctctagctgataacaaatttgcactgacttgctttagcactcaatttgcttttgcttgtcctgacggcgtaaaacacgtctatcagttacgtgccagatcagtttcacctaaactgttcatcagacaagaggaagttcaagaactttactctccaatttttcttattgttgcggcaatagtgtttataacactttgcttcacactcaaaagaaagacagaatgattgaactttcattaattgacttctatttgtgctttttagcctttctgctattccttgttttaattatgcttattatcttttggttctcacttgaactgcaagatcataatgaaacttgtcacgcctaaacgaacatgaaatttcttgttttcttaggaatcatcacaactgtagctgcatttcaccaagaatgtagtttacagtcatgtactcaacatcaaccatatgtagttgatgacccgtgtcctattcacttctattctaaatggtatattagagtaggagctagaaaatcagcacctttaattgaattgtgcgtggatgaggctggttctaaatcacccattcagtacatcgatatcggtaattatacagtttcctgtttaccttttacaattaattgccaggaacctaaattgggtagtcttgtagtgcgttgttcgttctatgaagactttttagagtatcatgacgttcgtgttgttttagatttcatctaaacgaacaaactaaaatgtctgataatggaccccaaaatcagcgaaatgcaccccgcattacgtttggtggaccctcagattcaactggcagtaaccagaatggagaacgcagtggggcgcgatcaaaacaacgtcggccccaaggtttacccaataatactgcgtcttggttcaccgctctcactcaacatggcaaggaagaccttaaattccctcgaggacaaggcgttccaattaacaccaatagcagtccagatgaccaaattggctactaccgaagagctaccagacgaattcgtggtggtgacggtaaaatgaaagatctcagtccaagatggtatttctactacctaggaactgggccagaagctggacttccctatggtgctaacaaagacggcatcatatgggttgcaactgagggagccttgaatacaccaaaagatcacattggcacccgcaatcctgctaacaatgctgcaatcgtgctacaacttcctcaaggaacaacattgccaaaaggcttctacgcagaagggagcagaggcggcagtcaagcctcttctcgttcctcatcacgtagtcgcaacagttcaagaaattcaactccaggcagcagtaggggaacttctcctgctagaatggctggcaatggcggtgatgctgctcttgctttgctgctgcttgacagattgaaccagcttgagagcaaaatgtctggtaaaggccaacaacaacaaggccaaactgtcactaagaaatctgctgctgaggcttctaagaagcctcggcaaaaacgtactgccactaaagcatacaatgtaacacaagctttcggcagacgtggtccagaacaaacccaaggaaattttggggaccaggaactaatcagacaaggaactgattacaaacattggccgcaaattgcacaatttgcccccagcgcttcagcgttcttcggaatgtcgcgcattggcatggaagtcacaccttcgggaacgtggttgacctacacaggtgccatcaaattggatgacaaagatccaaatttcaaagatcaagtcattttgctgaataagcatattgacgcatacaaaacattcccaccaacagagcctaaaaaggacaaaaagaagaaggctgatgaaactcaagccttaccgcagagacagaagaaacagcaaactgtgactcttcttcctgctgcagatttggatgatttctccaaacaattgcaacaatccatgagcagtgctgactcaactcaggcctaaactcatgcagaccacacaaggcagatgggctatataaacgttttcgcttttccgtttacgatatatagtctactcttgtgcagaatgaattctcgtaactacatagcacaagtagatgtagttaactttaatctcacatagcaatctttaatcagtgtgtaacattagggaggacttgaaagagccaccacattttcaccgaggccacgcggagtacgatcgagtgtacagtgaacaatgctagggagagctgcctatatggaagagccctaatgtgtaaaattaattttagtagtgctatccccatgtgattttaatagcttcttaggagaatgacaaaaaaaaaaaaaaaaaaaaaaaaaaaaaaaaa

SEQ ID NO: 2 - RNA, 19 nt, synthetic construct
  source 1..19: mol_type = other RNA
cacacgtccaactcagttt

SEQ ID NO: 3 - RNA, 19 nt, synthetic construct
  source 1..19: mol_type = other RNA
ttcttaagagtgcttatga

SEQ ID NO: 4 - RNA, 19 nt, synthetic construct
  source 1..19: mol_type = other RNA
tcttaagagtgcttatgaa

SEQ ID NO: 5 - RNA, 19 nt, synthetic construct
  source 1..19: mol_type = other RNA
attaatggcaatcttcatc

SEQ ID NO: 6 - RNA, 19 nt, synthetic construct
  source 1..19: mol_type = other RNA
ctgtggttatacctactaa

SEQ ID NO: 7 - RNA, 19 nt, synthetic construct
  source 1..19: mol_type = other RNA
acctttgacaatcttaaga

SEQ ID NO: 8 - RNA, 19 nt, synthetic construct
  source 1..19: mol_type = other RNA
caatcttaagacacttctt

SEQ ID NO: 9 - RNA, 19 nt, synthetic construct
  source 1..19: mol_type = other RNA
aatcttaagacacttcttt

SEQ ID NO: 10 - RNA, 19 nt, synthetic construct
  source 1..19: mol_type = other RNA
tgggcacactttcttatga

SEQ ID NO: 11 - RNA, 19 nt, synthetic construct
  source 1..19: mol_type = other RNA
agaaattgaccctaagttg

SEQ ID NO: 12 - RNA, 19 nt, synthetic construct
  source 1..19: mol_type = other RNA
aagaagtagtggaaaatcc

SEQ ID NO: 13 - RNA, 19 nt, synthetic construct
  source 1..19: mol_type = other RNA
aagtagtggaaaatcctac

SEQ ID NO: 14 - RNA, 19 nt, synthetic construct
  source 1..19: mol_type = other RNA
tgcttacgttaatacgttt

SEQ ID NO: 15 - RNA, 19 nt, synthetic construct
  source 1..19: mol_type = other RNA
tagacaatgtcttatctac

SEQ ID NO: 16 - RNA, 19 nt, synthetic construct
  source 1..19: mol_type = other RNA
catgtggtagtgttggttt

SEQ ID NO: 17 - RNA, 19 nt, synthetic construct
  source 1..19: mol_type = other RNA
ttttgatgttgttagacaa

SEQ ID NO: 18 - RNA, 19 nt, synthetic construct
  source 1..19: mol_type = other RNA
gtaatgctttagatcaagc

SEQ ID NO: 19 - RNA, 19 nt, synthetic construct
  source 1..19: mol_type = other RNA
agctatgacccaaatgtat

SEQ ID NO: 20 - RNA, 19 nt, synthetic construct
  source 1..19: mol_type = other RNA
catggtaccacatatatca

SEQ ID NO: 21 - RNA, 19 nt, synthetic construct
  source 1..19: mol_type = other RNA
atggtaccacatatatcac

SEQ ID NO: 22 - RNA, 19 nt, synthetic construct
  source 1..19: mol_type = other RNA
actgacattagataatcaa

SEQ ID NO: 23 - RNA, 19 nt, synthetic construct
  source 1..19: mol_type = other RNA
tacataatcaggatgtaaa

SEQ ID NO: 24 - RNA, 19 nt, synthetic construct
  source 1..19: mol_type = other RNA
ataatcaggatgtaaactt

SEQ ID NO: 25 - RNA, 19 nt, synthetic construct
  source 1..19: mol_type = other RNA
taatcaggatgtaaactta

SEQ ID NO: 26 - RNA, 19 nt, synthetic construct
  source 1..19: mol_type = other RNA
atgtaaacttacatagctc

SEQ ID NO: 27 - RNA, 19 nt, synthetic construct
  source 1..19: mol_type = other RNA
taaggctagactttattat

SEQ ID NO: 28 - RNA, 19 nt, synthetic construct
  source 1..19: mol_type = other RNA
gtgtctctatctgtagtac

SEQ ID NO: 29 - RNA, 19 nt, synthetic construct
  source 1..19: mol_type = other RNA
ctctatctgtagtactatg

SEQ ID NO: 30 - RNA, 19 nt, synthetic construct
  source 1..19: mol_type = other RNA
tctatctgtagtactatga

SEQ ID NO: 31 - RNA, 19 nt, synthetic construct
  source 1..19: mol_type = other RNA
tatctgtagtactatgacc

SEQ ID NO: 32 - RNA, 19 nt, synthetic construct
  source 1..19: mol_type = other RNA
atacaatgctagttaaaca

SEQ ID NO: 33 - RNA, 19 nt, synthetic construct
  source 1..19: mol_type = other RNA
tacaatgctagttaaacag

SEQ ID NO: 34 - RNA, 19 nt, synthetic construct
  source 1..19: mol_type = other RNA
ctagcaatgttgcaaatta

SEQ ID NO: 35 - RNA, 19 nt, synthetic construct
  source 1..19: mol_type = other RNA
gcataatgtctgatagaga

SEQ ID NO: 36 - RNA, 19 nt, synthetic construct
  source 1..19: mol_type = other RNA
agactcatctctatgatgg

SEQ ID NO: 37 - RNA, 19 nt, synthetic construct
  source 1..19: mol_type = other RNA
ggagtcacattaattggag

SEQ ID NO: 38 - RNA, 19 nt, synthetic construct
  source 1..19: mol_type = other RNA
tcgattcagatcttaatga

SEQ ID NO: 39 - RNA, 19 nt, synthetic construct
  source 1..19: mol_type = other RNA
atgagtacgaacttatgta

SEQ ID NO: 40 - RNA, 19 nt, synthetic construct
  source 1..19: mol_type = other RNA
gaacttatgtactcattcg

SEQ ID NO: 41 - RNA, 19 nt, synthetic construct
  source 1..19: mol_type = other RNA
aacttatgtactcattcgt

SEQ ID NO: 42 - RNA, 19 nt, synthetic construct
  source 1..19: mol_type = other RNA
tatgtactcattcgtttcg

SEQ ID NO: 43 - RNA, 19 nt, synthetic construct
  source 1..19: mol_type = other RNA
agttaatagcgtacttctt

SEQ ID NO: 44 - RNA, 19 nt, synthetic construct
  source 1..19: mol_type = other RNA
ttgctttcgtggtattctt

SEQ ID NO: 45 - RNA, 19 nt, synthetic construct
  source 1..19: mol_type = other RNA
acactagccatccttactg

SEQ ID NO: 46 - RNA, 19 nt, synthetic construct
  source 1..19: mol_type = other RNA
actgctgcaatattgttaa

SEQ ID NO: 47 - RNA, 19 nt, synthetic construct
  source 1..19: mol_type = other RNA
gctgcaatattgttaacgt

SEQ ID NO: 48 - RNA, 19 nt, synthetic construct
  source 1..19: mol_type = other RNA
ctgcaatattgttaacgtg

SEQ ID NO: 49 - RNA, 19 nt, synthetic construct
  source 1..19: mol_type = other RNA
tgatcttctggtctaaacg

SEQ ID NO: 50 - RNA, 19 nt, synthetic construct
  source 1..19: mol_type = other RNA
tcacgaacgctttcttatt

SEQ ID NO: 51 - RNA, 19 nt, synthetic construct
  source 1..19: mol_type = other RNA
aacgctttcttattacaaa

SEQ ID NO: 52 - RNA, 19 nt, synthetic construct
  source 1..19: mol_type = other RNA
cagtaagtgacaacagatg

SEQ ID NO: 53 - RNA, 19 nt, synthetic construct
  source 1..19: mol_type = other RNA
gtaagtgacaacagatgtt

SEQ ID NO: 54 - RNA, 19 nt, synthetic construct
  source 1..19: mol_type = other RNA
aggaagaccttaaattccc

SEQ ID NO: 55 - RNA, 19 nt, synthetic construct
  source 1..19: mol_type = other RNA
ccaattaacaccaatagca

SEQ ID NO: 56 - RNA, 19 nt, synthetic construct
  source 1..19: mol_type = other RNA
tccagatgaccaaattggc

SEQ ID NO: 57 - RNA, 19 nt, synthetic construct
  source 1..19: mol_type = other RNA
ccaagatggtatttctact

SEQ ID NO: 58 - RNA, 19 nt, synthetic construct
  source 1..19: mol_type = other RNA
agatggtatttctactacc

SEQ ID NO: 59 - RNA, 19 nt, synthetic construct
  source 1..19: mol_type = other RNA
gaatacaccaaaagatcac

SEQ ID NO: 60 - RNA, 19 nt, synthetic construct
  source 1..19: mol_type = other RNA
gtcactaagaaatctgctg

SEQ ID NO: 61 - RNA, 19 nt, synthetic construct
  source 1..19: mol_type = other RNA
actaaagcatacaatgtaa

SEQ ID NO: 62 - RNA, 19 nt, synthetic construct
  source 1..19: mol_type = other RNA
agacaaggaactgattaca

SEQ ID NO: 63 - RNA, 19 nt, synthetic construct
  source 1..19: mol_type = other RNA
acaaggaactgattacaaa

SEQ ID NO: 64 - RNA, 19 nt, synthetic construct
  source 1..19: mol_type = other RNA
aactgattacaaacattgg

SEQ ID NO: 65 - RNA, 19 nt, synthetic construct
  source 1..19: mol_type = other RNA
cgcaaattgcacaatttgc

SEQ ID NO: 66 - RNA, 19 nt, synthetic construct
  source 1..19: mol_type = other RNA
aattggatgacaaagatcc

SEQ ID NO: 67 - RNA, 19 nt, synthetic construct
  source 1..19: mol_type = other RNA
tgaataagcatattgacgc

SEQ ID NO: 68 - RNA, 19 nt, synthetic construct
  source 1..19: mol_type = other RNA
gacgcatacaaaacattcc

SEQ ID NO: 69 - RNA, 19 nt, synthetic construct
  source 1..19: mol_type = other RNA
cacatagcaatctttaatc

SEQ ID NO: 70 - RNA, 19 nt, synthetic construct
  source 1..19: mol_type = other RNA
aaactgagttggacgtgtg

SEQ ID NO: 71 - RNA, 19 nt, synthetic construct
  source 1..19: mol_type = other RNA
taactgagttggacgtgtg

SEQ ID NO: 72 - RNA, 19 nt, synthetic construct
  source 1..19: mol_type = other RNA
naactgagttggacgtgtg

SEQ ID NO: 73 - RNA, 19 nt, synthetic construct
  source 1..19: mol_type = other RNA
naactgagttggacgtgtn

SEQ ID NO: 74 - RNA, 19 nt, synthetic construct
  source 1..19: mol_type = other RNA
tcataagcactcttaagaa

SEQ ID NO: 75 - RNA, 19 nt, synthetic construct
  source 1..19: mol_type = other RNA
acataagcactcttaagaa

SEQ ID NO: 76 - RNA, 19 nt, synthetic construct
  source 1..19: mol_type = other RNA
ncataagcactcttaagaa

SEQ ID NO: 77 - RNA, 19 nt, synthetic construct
  source 1..19: mol_type = other RNA
ncataagcactcttaagan

SEQ ID NO: 78 - RNA, 19 nt, synthetic construct
  source 1..19: mol_type = other RNA
ttcataagcactcttaaga

SEQ ID NO: 79 - RNA, 19 nt, synthetic construct
  source 1..19: mol_type = other RNA
atcataagcactcttaaga

SEQ ID NO: 80 - RNA, 19 nt, synthetic construct
  source 1..19: mol_type = other RNA
ntcataagcactcttaaga

SEQ ID NO: 81 - RNA, 19 nt, synthetic construct
  source 1..19: mol_type = other RNA
ntcataagcactcttaagn

SEQ ID NO: 82 - RNA, 19 nt, synthetic construct
  source 1..19: mol_type = other RNA
gatgaagattgccattaat

SEQ ID NO: 83 - RNA, 19 nt, synthetic construct
  source 1..19: mol_type = other RNA
tatgaagattgccattaat

SEQ ID NO: 84 - RNA, 19 nt, synthetic construct
  source 1..19: mol_type = other RNA
aatgaagattgccattaat

SEQ ID NO: 85 - RNA, 19 nt, synthetic construct
  source 1..19: mol_type = other RNA
natgaagattgccattaat

SEQ ID NO: 86 - RNA, 19 nt, synthetic construct
  source 1..19: mol_type = other RNA
natgaagattgccattaan

SEQ ID NO: 87 - RNA, 19 nt, synthetic construct
  source 1..19: mol_type = other RNA
ttagtaggtataaccacag

SEQ ID NO: 88 - RNA, 19 nt, synthetic construct
  source 1..19: mol_type = other RNA
atagtaggtataaccacag

SEQ ID NO: 89 - RNA, 19 nt, synthetic construct
  source 1..19: mol_type = other RNA
ntagtaggtataaccacag

SEQ ID NO: 90 - RNA, 19 nt, synthetic construct
  source 1..19: mol_type = other RNA
ntagtaggtataaccacan

SEQ ID NO: 91 - RNA, 19 nt, synthetic construct
  source 1..19: mol_type = other RNA
tcttaagattgtcaaaggt

SEQ ID NO: 92 - RNA, 19 nt, synthetic construct
  source 1..19: mol_type = other RNA
acttaagattgtcaaaggt

SEQ ID NO: 93 - RNA, 19 nt, synthetic construct
  source 1..19: mol_type = other RNA
ncttaagattgtcaaaggt

SEQ ID NO: 94 - RNA, 19 nt, synthetic construct
  source 1..19: mol_type = other RNA
ncttaagattgtcaaaggn

SEQ ID NO: 95 - RNA, 19 nt, synthetic construct
  source 1..19: mol_type = other RNA
aagaagtgtcttaagattg

SEQ ID NO: 96 - RNA, 19 nt, synthetic construct
  source 1..19: mol_type = other RNA
tagaagtgtcttaagattg

SEQ ID NO: 97 - RNA, 19 nt, synthetic construct
  source 1..19: mol_type = other RNA
nagaagtgtcttaagattg

SEQ ID NO: 98 - RNA, 19 nt, synthetic construct
  source 1..19: mol_type = other RNA
nagaagtgtcttaagattn

SEQ ID NO: 99 - RNA, 19 nt, synthetic construct
  source 1..19: mol_type = other RNA
aaagaagtgtcttaagatt

SEQ ID NO: 100 - RNA, 19 nt, synthetic construct
  source 1..19: mol_type = other RNA
taagaagtgtcttaagatt

SEQ ID NO: 101 - RNA, 19 nt, synthetic construct
  source 1..19: mol_type = other RNA
naagaagtgtcttaagatt

SEQ ID NO: 102 - RNA, 19 nt, synthetic construct
  source 1..19: mol_type = other RNA
naagaagtgtcttaagatn

SEQ ID NO: 103 - RNA, 19 nt, synthetic construct
  source 1..19: mol_type = other RNA
tcataagaaagtgtgccca

SEQ ID NO: 104 - RNA, 19 nt, synthetic construct
  source 1..19: mol_type = other RNA
acataagaaagtgtgccca

SEQ ID NO: 105 - RNA, 19 nt, synthetic construct
  source 1..19: mol_type = other RNA
ncataagaaagtgtgccca

SEQ ID NO: 106 - RNA, 19 nt, synthetic construct
  source 1..19: mol_type = other RNA
ncataagaaagtgtgcccn

SEQ ID NO: 107 - RNA, 19 nt, synthetic construct
  source 1..19: mol_type = other RNA
caacttagggtcaatttct

SEQ ID NO: 108 - RNA, 19 nt, synthetic construct
  source 1..19: mol_type = other RNA
taacttagggtcaatttct

SEQ ID NO: 109 - RNA, 19 nt, synthetic construct
  source 1..19: mol_type = other RNA
aaacttagggtcaatttct

SEQ ID NO: 110 - RNA, 19 nt, synthetic construct
  source 1..19: mol_type = other RNA
naacttagggtcaatttct

SEQ ID NO: 111 - RNA, 19 nt, synthetic construct
  source 1..19: mol_type = other RNA
naacttagggtcaatttcn

SEQ ID NO: 112 - RNA, 19 nt, synthetic construct
  source 1..19: mol_type = other RNA
ggattttccactacttctt

SEQ ID NO: 113 - RNA, 19 nt, synthetic construct
  source 1..19: mol_type = other RNA
tgattttccactacttctt

SEQ ID NO: 114 - RNA, 19 nt, synthetic construct
  source 1..19: mol_type = other RNA
agattttccactacttctt

SEQ ID NO: 115 - RNA, 19 nt, synthetic construct
  source 1..19: mol_type = other RNA
ngattttccactacttctt

SEQ ID NO: 116 - RNA, 19 nt, synthetic construct
  source 1..19: mol_type = other RNA
ngattttccactacttctn

SEQ ID NO: 117 - RNA, 19 nt, synthetic construct
  source 1..19: mol_type = other RNA
gtaggattttccactactt

SEQ ID NO: 118 - RNA, 19 nt, synthetic construct
  source 1..19: mol_type = other RNA
ttaggattttccactactt

SEQ ID NO: 119 - RNA, 19 nt, synthetic construct
  source 1..19: mol_type = other RNA
ataggattttccactactt

SEQ ID NO: 120 - RNA, 19 nt, synthetic construct
  source 1..19: mol_type = other RNA
ntaggattttccactactt

SEQ ID NO: 121 - RNA, 19 nt, synthetic construct
  source 1..19: mol_type = other RNA
ntaggattttccactactn

SEQ ID NO: 122 - RNA, 19 nt, synthetic construct
  source 1..19: mol_type = other RNA
aaacgtattaacgtaagca

SEQ ID NO: 123 - RNA, 19 nt, synthetic construct
  source 1..19: mol_type = other RNA
taacgtattaacgtaagca

SEQ ID NO: 124 - RNA, 19 nt, synthetic construct
  source 1..19: mol_type = other RNA
naacgtattaacgtaagca

SEQ ID NO: 125 - RNA, 19 nt, synthetic construct
  source 1..19: mol_type = other RNA
naacgtattaacgtaagcn

SEQ ID NO: 126 - RNA, 19 nt, synthetic construct
  source 1..19: mol_type = other RNA
gtagataagacattgtcta

SEQ ID NO: 127 - RNA, 19 nt, synthetic construct
  source 1..19: mol_type = other RNA
ttagataagacattgtcta

SEQ ID NO: 128 - RNA, 19 nt, synthetic construct
  source 1..19: mol_type = other RNA
atagataagacattgtcta

SEQ ID NO: 129 - RNA, 19 nt, synthetic construct
  source 1..19: mol_type = other RNA
ntagataagacattgtcta

SEQ ID NO: 130 - RNA, 19 nt, synthetic construct
  source 1..19: mol_type = other RNA
ntagataagacattgtctn

SEQ ID NO: 131 - RNA, 19 nt, synthetic construct
  source 1..19: mol_type = other RNA
aaaccaacactaccacatg

SEQ ID NO: 132 - RNA, 19 nt, synthetic construct
  source 1..19: mol_type = other RNA
taaccaacactaccacatg

SEQ ID NO: 133 - RNA, 19 nt, synthetic construct
  source 1..19: mol_type = other RNA
naaccaacactaccacatg

SEQ ID NO: 134 - RNA, 19 nt, synthetic construct
  source 1..19: mol_type = other RNA
naaccaacactaccacatn

SEQ ID NO: 135 - RNA, 19 nt, synthetic construct
  source 1..19: mol_type = other RNA
ttgtctaacaacatcaaaa

SEQ ID NO: 136 - RNA, 19 nt, synthetic construct
  source 1..19: mol_type = other RNA
atgtctaacaacatcaaaa

SEQ ID NO: 137 - RNA, 19 nt, synthetic construct
  source 1..19: mol_type = other RNA
ntgtctaacaacatcaaaa

SEQ ID NO: 138 - RNA, 19 nt, synthetic construct
  source 1..19: mol_type = other RNA
ntgtctaacaacatcaaan

SEQ ID NO: 139 - RNA, 19 nt, synthetic construct
  source 1..19: mol_type = other RNA
gcttgatctaaagcattac

SEQ ID NO: 140 - RNA, 19 nt, synthetic construct
  source 1..19: mol_type = other RNA
tcttgatctaaagcattac

SEQ ID NO: 141 - RNA, 19 nt, synthetic construct
  source 1..19: mol_type = other RNA
acttgatctaaagcattac

SEQ ID NO: 142 - RNA, 19 nt, synthetic construct
  source 1..19: mol_type = other RNA
ncttgatctaaagcattac

SEQ ID NO: 143 - RNA, 19 nt, synthetic construct
  source 1..19: mol_type = other RNA
ncttgatctaaagcattan

SEQ ID NO: 144 - RNA, 19 nt, synthetic construct
  source 1..19: mol_type = other RNA
atacatttgggtcatagct

SEQ ID NO: 145 - RNA, 19 nt, synthetic construct
  source 1..19: mol_type = other RNA
ttacatttgggtcatagct

SEQ ID NO: 146 - RNA, 19 nt, synthetic construct
  source 1..19: mol_type = other RNA
ntacatttgggtcatagct

SEQ ID NO: 147 - RNA, 19 nt, synthetic construct
  source 1..19: mol_type = other RNA
ntacatttgggtcatagcn

SEQ ID NO: 148 - RNA, 19 nt, synthetic construct
  source 1..19: mol_type = other RNA
tgatatatgtggtaccatg

SEQ ID NO: 149 - RNA, 19 nt, synthetic construct
  source 1..19: mol_type = other RNA
agatatatgtggtaccatg

SEQ ID NO: 150 - RNA, 19 nt, synthetic construct
  source 1..19: mol_type = other RNA
ngatatatgtggtaccatg

SEQ ID NO: 151 - RNA, 19 nt, synthetic construct
  source 1..19: mol_type = other RNA
ngatatatgtggtaccatn

SEQ ID NO: 152 - RNA, 19 nt, synthetic construct
  source 1..19: mol_type = other RNA
gtgatatatgtggtaccat

SEQ ID NO: 153 - RNA, 19 nt, synthetic construct
  source 1..19: mol_type = other RNA
ttgatatatgtggtaccat

SEQ ID NO: 154 - RNA, 19 nt, synthetic construct
  source 1..19: mol_type = other RNA
atgatatatgtggtaccat

SEQ ID NO: 155 - RNA, 19 nt, synthetic construct
  source 1..19: mol_type = other RNA
ntgatatatgtggtaccat

SEQ ID NO: 156 - RNA, 19 nt, synthetic construct
  source 1..19: mol_type = other RNA
ntgatatatgtggtaccan

SEQ ID NO: 157 - RNA, 19 nt, synthetic construct
  source 1..19: mol_type = other RNA
ttgattatctaatgtcagt

SEQ ID NO: 158 - RNA, 19 nt, synthetic construct
  source 1..19: mol_type = other RNA
atgattatctaatgtcagt

SEQ ID NO: 159 - RNA, 19 nt, synthetic construct
  source 1..19: mol_type = other RNA
ntgattatctaatgtcagt

SEQ ID NO: 160 - RNA, 19 nt, synthetic construct
  source 1..19: mol_type = other RNA
ntgattatctaatgtcagn

SEQ ID NO: 161 - RNA, 19 nt, synthetic construct
  source 1..19: mol_type = other RNA
tttacatcctgattatgta

SEQ ID NO: 162 - RNA, 19 nt, synthetic construct
  source 1..19: mol_type = other RNA
attacatcctgattatgta

SEQ ID NO: 163 - RNA, 19 nt, synthetic construct
  source 1..19: mol_type = other RNA
nttacatcctgattatgta

SEQ ID NO: 164 - RNA, 19 nt, synthetic construct
  source 1..19: mol_type = other RNA
nttacatcctgattatgtn

SEQ ID NO: 165 - RNA, 19 nt, synthetic construct
  source 1..19: mol_type = other RNA
aagtttacatcctgattat

SEQ ID NO: 166 - RNA, 19 nt, synthetic construct
  source 1..19: mol_type = other RNA
tagtttacatcctgattat

SEQ ID NO: 167 - RNA, 19 nt, synthetic construct
  source 1..19: mol_type = other RNA
nagtttacatcctgattat

SEQ ID NO: 168 - RNA, 19 nt, synthetic construct
  source 1..19: mol_type = other RNA
nagtttacatcctgattan

SEQ ID NO: 169 - RNA, 19 nt, synthetic construct
  source 1..19: mol_type = other RNA
taagtttacatcctgatta

SEQ ID NO: 170 - RNA, 19 nt, synthetic construct
  source 1..19: mol_type = other RNA
aaagtttacatcctgatta

SEQ ID NO: 171 - RNA, 19 nt, synthetic construct
  source 1..19: mol_type = other RNA
naagtttacatcctgatta

SEQ ID NO: 172 - RNA, 19 nt, synthetic construct
  source 1..19: mol_type = other RNA
naagtttacatcctgattn

SEQ ID NO: 173 - RNA, 19 nt, synthetic construct
  source 1..19: mol_type = other RNA
gagctatgtaagtttacat

SEQ ID NO: 174 - RNA, 19 nt, synthetic construct
  source 1..19: mol_type = other RNA
tagctatgtaagtttacat

SEQ ID NO: 175 - RNA, 19 nt, synthetic construct
  source 1..19: mol_type = other RNA
aagctatgtaagtttacat

SEQ ID NO: 176 - RNA, 19 nt, synthetic construct
  source 1..19: mol_type = other RNA
nagctatgtaagtttacat

SEQ ID NO: 177 - RNA, 19 nt, synthetic construct
  source 1..19: mol_type = other RNA
nagctatgtaagtttacan

SEQ ID NO: 178 - RNA, 19 nt, synthetic construct
  source 1..19: mol_type = other RNA
ataataaagtctagcctta

SEQ ID NO: 179 - RNA, 19 nt, synthetic construct
  source 1..19: mol_type = other RNA
ttaataaagtctagcctta

SEQ ID NO: 180 - RNA, 19 nt, synthetic construct
  source 1..19: mol_type = other RNA
ntaataaagtctagcctta

SEQ ID NO: 181 - RNA, 19 nt, synthetic construct
  source 1..19: mol_type = other RNA
ntaataaagtctagccttn

SEQ ID NO: 182 - RNA, 19 nt, synthetic construct
  source 1..19: mol_type = other RNA
gtactacagatagagacac

SEQ ID NO: 183 - RNA, 19 nt, synthetic construct
  source 1..19: mol_type = other RNA
ttactacagatagagacac

SEQ ID NO: 184 - RNA, 19 nt, synthetic construct
  source 1..19: mol_type = other RNA
atactacagatagagacac

SEQ ID NO: 185 - RNA, 19 nt, synthetic construct
  source 1..19: mol_type = other RNA
ntactacagatagagacac

SEQ ID NO: 186 - RNA, 19 nt, synthetic construct
  source 1..19: mol_type = other RNA
ntactacagatagagacan

SEQ ID NO: 187 - RNA, 19 nt, synthetic construct
  source 1..19: mol_type = other RNA
catagtactacagatagag

SEQ ID NO: 188 - RNA, 19 nt, synthetic construct
  source 1..19: mol_type = other RNA
tatagtactacagatagag

SEQ ID NO: 189 - RNA, 19 nt, synthetic construct
  source 1..19: mol_type = other RNA
aatagtactacagatagag

SEQ ID NO: 190 - RNA, 19 nt, synthetic construct
  source 1..19: mol_type = other RNA
natagtactacagatagag

SEQ ID NO: 191 - RNA, 19 nt, synthetic construct
  source 1..19: mol_type = other RNA
natagtactacagatagan

SEQ ID NO: 192 - RNA, 19 nt, synthetic construct
  source 1..19: mol_type = other RNA
tcatagtactacagataga

SEQ ID NO: 193 - RNA, 19 nt, synthetic construct
  source 1..19: mol_type = other RNA
acatagtactacagataga

SEQ ID NO: 194 - RNA, 19 nt, synthetic construct
  source 1..19: mol_type = other RNA
ncatagtactacagataga

SEQ ID NO: 195 - RNA, 19 nt, synthetic construct
  source 1..19: mol_type = other RNA
ncatagtactacagatagn

SEQ ID NO: 196 - RNA, 19 nt, synthetic construct
  source 1..19: mol_type = other RNA
ggtcatagtactacagata

SEQ ID NO: 197 - RNA, 19 nt, synthetic construct
  source 1..19: mol_type = other RNA
tgtcatagtactacagata

SEQ ID NO: 198 - RNA, 19 nt, synthetic construct
  source 1..19: mol_type = other RNA
agtcatagtactacagata

SEQ ID NO: 199 - RNA, 19 nt, synthetic construct
  source 1..19: mol_type = other RNA
ngtcatagtactacagata

SEQ ID NO: 200 - RNA, 19 nt, synthetic construct
  source 1..19: mol_type = other RNA
ngtcatagtactacagatn

SEQ ID NO: 201 - RNA, 19 nt, synthetic construct
  source 1..19: mol_type = other RNA
tgtttaactagcattgtat

SEQ ID NO: 202 - RNA, 19 nt, synthetic construct
  source 1..19: mol_type = other RNA
agtttaactagcattgtat

SEQ ID NO: 203 - RNA, 19 nt, synthetic construct
  source 1..19: mol_type = other RNA
ngtttaactagcattgtat

SEQ ID NO: 204 - RNA, 19 nt, synthetic construct
  source 1..19: mol_type = other RNA
ngtttaactagcattgtan

SEQ ID NO: 205 - RNA, 19 nt, synthetic construct
  source 1..19: mol_type = other RNA
ctgtttaactagcattgta

SEQ ID NO: 206 - RNA, 19 nt, synthetic construct
  source 1..19: mol_type = other RNA
ttgtttaactagcattgta

SEQ ID NO: 207 - RNA, 19 nt, synthetic construct
  source 1..19: mol_type = other RNA
atgtttaactagcattgta

SEQ ID NO: 208 - RNA, 19 nt, synthetic construct
  source 1..19: mol_type = other RNA
ntgtttaactagcattgta

SEQ ID NO: 209 - RNA, 19 nt, synthetic construct
  source 1..19: mol_type = other RNA
ntgtttaactagcattgtn

SEQ ID NO: 210 - RNA, 19 nt, synthetic construct
  source 1..19: mol_type = other RNA
taatttgcaacattgctag

SEQ ID NO: 211 - RNA, 19 nt, synthetic construct
  source 1..19: mol_type = other RNA
aaatttgcaacattgctag

SEQ ID NO: 212 - RNA, 19 nt, synthetic construct
  source 1..19: mol_type = other RNA
naatttgcaacattgctag

SEQ ID NO: 213 - RNA, 19 nt, synthetic construct
  source 1..19: mol_type = other RNA
naatttgcaacattgctan

SEQ ID NO: 214 - RNA, 19 nt, synthetic construct
  source 1..19: mol_type = other RNA
tctctatcagacattatgc

SEQ ID NO: 215 - RNA, 19 nt, synthetic construct
  source 1..19: mol_type = other RNA
actctatcagacattatgc

SEQ ID NO: 216 - RNA, 19 nt, synthetic construct
  source 1..19: mol_type = other RNA
nctctatcagacattatgc

SEQ ID NO: 217 - RNA, 19 nt, synthetic construct
  source 1..19: mol_type = other RNA
nctctatcagacattatgn

SEQ ID NO: 218 - RNA, 19 nt, synthetic construct
  source 1..19: mol_type = other RNA
ccatcatagagatgagtct

SEQ ID NO: 219 - RNA, 19 nt, synthetic construct
  source 1..19: mol_type = other RNA
tcatcatagagatgagtct

SEQ ID NO: 220 - RNA, 19 nt, synthetic construct
  source 1..19: mol_type = other RNA
acatcatagagatgagtct

SEQ ID NO: 221 - RNA, 19 nt, synthetic construct
  source 1..19: mol_type = other RNA
ncatcatagagatgagtct

SEQ ID NO: 222 - RNA, 19 nt, synthetic construct
  source 1..19: mol_type = other RNA
ncatcatagagatgagtcn

SEQ ID NO: 223 - RNA, 19 nt, synthetic construct
  source 1..19: mol_type = other RNA
ctccaattaatgtgactcc

SEQ ID NO: 224 - RNA, 19 nt, synthetic construct
  source 1..19: mol_type = other RNA
ttccaattaatgtgactcc

SEQ ID NO: 225 - RNA, 19 nt, synthetic construct
  source 1..19: mol_type = other RNA
atccaattaatgtgactcc

SEQ ID NO: 226 - RNA, 19 nt, synthetic construct
  source 1..19: mol_type = other RNA
ntccaattaatgtgactcc

SEQ ID NO: 227 - RNA, 19 nt, synthetic construct
  source 1..19: mol_type = other RNA
ntccaattaatgtgactcn

SEQ ID NO: 228 - RNA, 19 nt, synthetic construct
  source 1..19: mol_type = other RNA
tcattaagatctgaatcga

SEQ ID NO: 229 - RNA, 19 nt, synthetic construct
  source 1..19: mol_type = other RNA
acattaagatctgaatcga

SEQ ID NO: 230 - RNA, 19 nt, synthetic construct
  source 1..19: mol_type = other RNA
ncattaagatctgaatcga

SEQ ID NO: 231 - RNA, 19 nt, synthetic construct
  source 1..19: mol_type = other RNA
ncattaagatctgaatcgn

SEQ ID NO: 232 - RNA, 19 nt, synthetic construct
  source 1..19: mol_type = other RNA
tacataagttcgtactcat

SEQ ID NO: 233 - RNA, 19 nt, synthetic construct
  source 1..19: mol_type = other RNA
aacataagttcgtactcat

SEQ ID NO: 234 - RNA, 19 nt, synthetic construct
  source 1..19: mol_type = other RNA
nacataagttcgtactcat

SEQ ID NO: 235 - RNA, 19 nt, synthetic construct
  source 1..19: mol_type = other RNA
nacataagttcgtactcan

SEQ ID NO: 236 - RNA, 19 nt, synthetic construct
  source 1..19: mol_type = other RNA
cgaatgagtacataagttc

SEQ ID NO: 237 - RNA, 19 nt, synthetic construct
  source 1..19: mol_type = other RNA
tgaatgagtacataagttc

SEQ ID NO: 238 - RNA, 19 nt, synthetic construct
  source 1..19: mol_type = other RNA
agaatgagtacataagttc

SEQ ID NO: 239 - RNA, 19 nt, synthetic construct
  source 1..19: mol_type = other RNA
ngaatgagtacataagttc

SEQ ID NO: 240 - RNA, 19 nt, synthetic construct
  source 1..19: mol_type = other RNA
ngaatgagtacataagttn

SEQ ID NO: 241 - RNA, 19 nt, synthetic construct
  source 1..19: mol_type = other RNA
acgaatgagtacataagtt

SEQ ID NO: 242 - RNA, 19 nt, synthetic construct
  source 1..19: mol_type = other RNA
tcgaatgagtacataagtt

SEQ ID NO: 243 - RNA, 19 nt, synthetic construct
  source 1..19: mol_type = other RNA
ncgaatgagtacataagtt

SEQ ID NO: 244 - RNA, 19 nt, synthetic construct
  source 1..19: mol_type = other RNA
ncgaatgagtacataagtn

SEQ ID NO: 245 - RNA, 19 nt, synthetic construct
  source 1..19: mol_type = other RNA
cgaaacgaatgagtacata

SEQ ID NO: 246 - RNA, 19 nt, synthetic construct
  source 1..19: mol_type = other RNA
tgaaacgaatgagtacata

SEQ ID NO: 247 - RNA, 19 nt, synthetic construct
  source 1..19: mol_type = other RNA
agaaacgaatgagtacata

SEQ ID NO: 248 - RNA, 19 nt, synthetic construct
  source 1..19: mol_type = other RNA
ngaaacgaatgagtacata

SEQ ID NO: 249 - RNA, 19 nt, synthetic construct
  source 1..19: mol_type = other RNA
ngaaacgaatgagtacatn

SEQ ID NO: 250 - RNA, 19 nt, synthetic construct
  source 1..19: mol_type = other RNA
aagaagtacgctattaact

SEQ ID NO: 251 - RNA, 19 nt, synthetic construct
  source 1..19: mol_type = other RNA
tagaagtacgctattaact

SEQ ID NO: 252 - RNA, 19 nt, synthetic construct
  source 1..19: mol_type = other RNA
nagaagtacgctattaact

SEQ ID NO: 253 - RNA, 19 nt, synthetic construct
  source 1..19: mol_type = other RNA
nagaagtacgctattaacn

SEQ ID NO: 254 - RNA, 19 nt, synthetic construct
  source 1..19: mol_type = other RNA
aagaataccacgaaagcaa

SEQ ID NO: 255 - RNA, 19 nt, synthetic construct
  source 1..19: mol_type = other RNA
tagaataccacgaaagcaa

SEQ ID NO: 256 - RNA, 19 nt, synthetic construct
  source 1..19: mol_type = other RNA
nagaataccacgaaagcaa

SEQ ID NO: 257 - RNA, 19 nt, synthetic construct
  source 1..19: mol_type = other RNA
nagaataccacgaaagcan

SEQ ID NO: 258 - RNA, 19 nt, synthetic construct
  source 1..19: mol_type = other RNA
cagtaaggatggctagtgt

SEQ ID NO: 259 - RNA, 19 nt, synthetic construct
  source 1..19: mol_type = other RNA
tagtaaggatggctagtgt

SEQ ID NO: 260 - RNA, 19 nt, synthetic construct
  source 1..19: mol_type = other RNA
aagtaaggatggctagtgt

SEQ ID NO: 261 - RNA, 19 nt, synthetic construct
  source 1..19: mol_type = other RNA
nagtaaggatggctagtgt

SEQ ID NO: 262 - RNA, 19 nt, synthetic construct
  source 1..19: mol_type = other RNA
nagtaaggatggctagtgn

SEQ ID NO: 263 - RNA, 19 nt, synthetic construct
  source 1..19: mol_type = other RNA
ttaacaatattgcagcagt

SEQ ID NO: 264 - RNA, 19 nt, synthetic construct
  source 1..19: mol_type = other RNA
ataacaatattgcagcagt

SEQ ID NO: 265 - RNA, 19 nt, synthetic construct
  source 1..19: mol_type = other RNA
ntaacaatattgcagcagt

SEQ ID NO: 266 - RNA, 19 nt, synthetic construct
  source 1..19: mol_type = other RNA
ntaacaatattgcagcagn

SEQ ID NO: 267 - RNA, 19 nt, synthetic construct
  source 1..19: mol_type = other RNA
acgttaacaatattgcagc

SEQ ID NO: 268 - RNA, 19 nt, synthetic construct
  source 1..19: mol_type = other RNA
tcgttaacaatattgcagc

SEQ ID NO: 269 - RNA, 19 nt, synthetic construct
  source 1..19: mol_type = other RNA
ncgttaacaatattgcagc

SEQ ID NO: 270 - RNA, 19 nt, synthetic construct
  source 1..19: mol_type = other RNA
ncgttaacaatattgcagn

SEQ ID NO: 271 - RNA, 19 nt, synthetic construct
  source 1..19: mol_type = other RNA
cacgttaacaatattgcag

SEQ ID NO: 272 - RNA, 19 nt, synthetic construct
  source 1..19: mol_type = other RNA
tacgttaacaatattgcag

SEQ ID NO: 273 - RNA, 19 nt, synthetic construct
  source 1..19: mol_type = other RNA
aacgttaacaatattgcag

SEQ ID NO: 274 - RNA, 19 nt, synthetic construct
  source 1..19: mol_type = other RNA
nacgttaacaatattgcag

SEQ ID NO: 275 - RNA, 19 nt, synthetic construct
  source 1..19: mol_type = other RNA
nacgttaacaatattgcan

SEQ ID NO: 276 - RNA, 19 nt, synthetic construct
  source 1..19: mol_type = other RNA
cgtttagaccagaagatca

SEQ ID NO: 277 - RNA, 19 nt, synthetic construct
  source 1..19: mol_type = other RNA
tgtttagaccagaagatca

SEQ ID NO: 278 - RNA, 19 nt, synthetic construct
  source 1..19: mol_type = other RNA
agtttagaccagaagatca

SEQ ID NO: 279 - RNA, 19 nt, synthetic construct
  source 1..19: mol_type = other RNA
ngtttagaccagaagatca

SEQ ID NO: 280 - RNA, 19 nt, synthetic construct
  source 1..19: mol_type = other RNA
ngtttagaccagaagatcn

SEQ ID NO: 281 - RNA, 19 nt, synthetic construct
  source 1..19: mol_type = other RNA
aataagaaagcgttcgtga

SEQ ID NO: 282 - RNA, 19 nt, synthetic construct
  source 1..19: mol_type = other RNA
tataagaaagcgttcgtga

SEQ ID NO: 283 - RNA, 19 nt, synthetic construct
  source 1..19: mol_type = other RNA
nataagaaagcgttcgtga

SEQ ID NO: 284 - RNA, 19 nt, synthetic construct
  source 1..19: mol_type = other RNA
nataagaaagcgttcgtgn

SEQ ID NO: 285 - RNA, 19 nt, synthetic construct
  source 1..19: mol_type = other RNA
tttgtaataagaaagcgtt

SEQ ID NO: 286 - RNA, 19 nt, synthetic construct
  source 1..19: mol_type = other RNA
attgtaataagaaagcgtt

SEQ ID NO: 287 - RNA, 19 nt, synthetic construct
  source 1..19: mol_type = other RNA
nttgtaataagaaagcgtt

SEQ ID NO: 288 - RNA, 19 nt, synthetic construct
  source 1..19: mol_type = other RNA
nttgtaataagaaagcgtn

SEQ ID NO: 289 - RNA, 19 nt, synthetic construct
  source 1..19: mol_type = other RNA
catctgttgtcacttactg

SEQ ID NO: 290 - RNA, 19 nt, synthetic construct
  source 1..19: mol_type = other RNA
tatctgttgtcacttactg

SEQ ID NO: 291 - RNA, 19 nt, synthetic construct
  source 1..19: mol_type = other RNA
aatctgttgtcacttactg

SEQ ID NO: 292 - RNA, 19 nt, synthetic construct
  source 1..19: mol_type = other RNA
natctgttgtcacttactg

SEQ ID NO: 293 - RNA, 19 nt, synthetic construct
  source 1..19: mol_type = other RNA
natctgttgtcacttactn

SEQ ID NO: 294 - RNA, 19 nt, synthetic construct
  source 1..19: mol_type = other RNA
aacatctgttgtcacttac

SEQ ID NO: 295 - RNA, 19 nt, synthetic construct
  source 1..19: mol_type = other RNA
tacatctgttgtcacttac

SEQ ID NO: 296 - RNA, 19 nt, synthetic construct
  source 1..19: mol_type = other RNA
nacatctgttgtcacttac

SEQ ID NO: 297 - RNA, 19 nt, synthetic construct
  source 1..19: mol_type = other RNA
nacatctgttgtcacttan

SEQ ID NO: 298 - RNA, 19 nt, synthetic construct
  source 1..19: mol_type = other RNA
gggaatttaaggtcttcct

SEQ ID NO: 299 - RNA, 19 nt, synthetic construct
  source 1..19: mol_type = other RNA
tggaatttaaggtcttcct

SEQ ID NO: 300 - RNA, 19 nt, synthetic construct
  source 1..19: mol_type = other RNA
aggaatttaaggtcttcct

SEQ ID NO: 301 - RNA, 19 nt, synthetic construct
  source 1..19: mol_type = other RNA
nggaatttaaggtcttcct

SEQ ID NO: 302 - RNA, 19 nt, synthetic construct
  source 1..19: mol_type = other RNA
nggaatttaaggtcttccn

SEQ ID NO: 303 - RNA, 19 nt, synthetic construct
  source 1..19: mol_type = other RNA
tgctattggtgttaattgg

SEQ ID NO: 304 - RNA, 19 nt, synthetic construct
  source 1..19: mol_type = other RNA
agctattggtgttaattgg

SEQ ID NO: 305 - RNA, 19 nt, synthetic construct
  source 1..19: mol_type = other RNA
ngctattggtgttaattgg

SEQ ID NO: 306 - RNA, 19 nt, synthetic construct
  source 1..19: mol_type = other RNA
ngctattggtgttaattgn

SEQ ID NO: 307 - RNA, 19 nt, synthetic construct
  source 1..19: mol_type = other RNA
gccaatttggtcatctgga

SEQ ID NO: 308 - RNA, 19 nt, synthetic construct
  source 1..19: mol_type = other RNA
tccaatttggtcatctgga

SEQ ID NO: 309 - RNA, 19 nt, synthetic construct
  source 1..19: mol_type = other RNA
accaatttggtcatctgga

SEQ ID NO: 310 - RNA, 19 nt, synthetic construct
  source 1..19: mol_type = other RNA
nccaatttggtcatctgga

SEQ ID NO: 311 - RNA, 19 nt, synthetic construct
  source 1..19: mol_type = other RNA
nccaatttggtcatctggn

SEQ ID NO: 312 - RNA, 19 nt, synthetic construct
  source 1..19: mol_type = other RNA
agtagaaataccatcttgg

SEQ ID NO: 313 - RNA, 19 nt, synthetic construct
  source 1..19: mol_type = other RNA
tgtagaaataccatcttgg

SEQ ID NO: 314 - RNA, 19 nt, synthetic construct
  source 1..19: mol_type = other RNA
ngtagaaataccatcttgg

SEQ ID NO: 315 - RNA, 19 nt, synthetic construct
  source 1..19: mol_type = other RNA
ngtagaaataccatcttgn

SEQ ID NO: 316 - RNA, 19 nt, synthetic construct
  source 1..19: mol_type = other RNA
ggtagtagaaataccatct

SEQ ID NO: 317 - RNA, 19 nt, synthetic construct
  source 1..19: mol_type = other RNA
tgtagtagaaataccatct

SEQ ID NO: 318 - RNA, 19 nt, synthetic construct
  source 1..19: mol_type = other RNA
agtagtagaaataccatct

SEQ ID NO: 319 - RNA, 19 nt, synthetic construct
  source 1..19: mol_type = other RNA
ngtagtagaaataccatct

SEQ ID NO: 320 - RNA, 19 nt, synthetic construct
  source 1..19: mol_type = other RNA
ngtagtagaaataccatcn

SEQ ID NO: 321 - RNA, 19 nt, synthetic construct
  source 1..19: mol_type = other RNA
gtgatcttttggtgtattc

SEQ ID NO: 322 - RNA, 19 nt, synthetic construct
  source 1..19: mol_type = other RNA
ttgatcttttggtgtattc

SEQ ID NO: 323 - RNA, 19 nt, synthetic construct
  source 1..19: mol_type = other RNA
atgatcttttggtgtattc

SEQ ID NO: 324 - RNA, 19 nt, synthetic construct
  source 1..19: mol_type = other RNA
ntgatcttttggtgtattc

SEQ ID NO: 325 - RNA, 19 nt, synthetic construct
  source 1..19: mol_type = other RNA
ntgatcttttggtgtattn

SEQ ID NO: 326 - RNA, 19 nt, synthetic construct
  source 1..19: mol_type = other RNA
cagcagatttcttagtgac

SEQ ID NO: 327 - RNA, 19 nt, synthetic construct
  source 1..19: mol_type = other RNA
tagcagatttcttagtgac

SEQ ID NO: 328 - RNA, 19 nt, synthetic construct
  source 1..19: mol_type = other RNA
aagcagatttcttagtgac

SEQ ID NO: 329 - RNA, 19 nt, synthetic construct
  source 1..19: mol_type = other RNA
nagcagatttcttagtgac

SEQ ID NO: 330 - RNA, 19 nt, synthetic construct
  source 1..19: mol_type = other RNA
nagcagatttcttagtgan

SEQ ID NO: 331 - RNA, 19 nt, synthetic construct
  source 1..19: mol_type = other RNA
ttacattgtatgctttagt

SEQ ID NO: 332 - RNA, 19 nt, synthetic construct
  source 1..19: mol_type = other RNA
atacattgtatgctttagt

SEQ ID NO: 333 - RNA, 19 nt, synthetic construct
  source 1..19: mol_type = other RNA
ntacattgtatgctttagt

SEQ ID NO: 334 - RNA, 19 nt, synthetic construct
  source 1..19: mol_type = other RNA
ntacattgtatgctttagn

SEQ ID NO: 335 - RNA, 19 nt, synthetic construct
  source 1..19: mol_type = other RNA
tgtaatcagttccttgtct

SEQ ID NO: 336 - RNA, 19 nt, synthetic construct
  source 1..19: mol_type = other RNA
agtaatcagttccttgtct

SEQ ID NO: 337 - RNA, 19 nt, synthetic construct
  source 1..19: mol_type = other RNA
ngtaatcagttccttgtct

SEQ ID NO: 338 - RNA, 19 nt, synthetic construct
  source 1..19: mol_type = other RNA
ngtaatcagttccttgtcn

SEQ ID NO: 339 - RNA, 19 nt, synthetic construct
  source 1..19: mol_type = other RNA
tttgtaatcagttccttgt

SEQ ID NO: 340 - RNA, 19 nt, synthetic construct
  source 1..19: mol_type = other RNA
attgtaatcagttccttgt

SEQ ID NO: 341 - RNA, 19 nt, synthetic construct
  source 1..19: mol_type = other RNA
nttgtaatcagttccttgt

SEQ ID NO: 342 - RNA, 19 nt, synthetic construct
  source 1..19: mol_type = other RNA
nttgtaatcagttccttgn

SEQ ID NO: 343 - RNA, 19 nt, synthetic construct
  source 1..19: mol_type = other RNA
ccaatgtttgtaatcagtt

SEQ ID NO: 344 - RNA, 19 nt, synthetic construct
  source 1..19: mol_type = other RNA
tcaatgtttgtaatcagtt

SEQ ID NO: 345 - RNA, 19 nt, synthetic construct
  source 1..19: mol_type = other RNA
acaatgtttgtaatcagtt

SEQ ID NO: 346 - RNA, 19 nt, synthetic construct
  source 1..19: mol_type = other RNA
ncaatgtttgtaatcagtt

SEQ ID NO: 347 - RNA, 19 nt, synthetic construct
  source 1..19: mol_type = other RNA
ncaatgtttgtaatcagtn

SEQ ID NO: 348 - RNA, 19 nt, synthetic construct
  source 1..19: mol_type = other RNA
gcaaattgtgcaatttgcg

SEQ ID NO: 349 - RNA, 19 nt, synthetic construct
  source 1..19: mol_type = other RNA
tcaaattgtgcaatttgcg

SEQ ID NO: 350 - RNA, 19 nt, synthetic construct
  source 1..19: mol_type = other RNA
acaaattgtgcaatttgcg

SEQ ID NO: 351 - RNA, 19 nt, synthetic construct
  source 1..19: mol_type = other RNA
ncaaattgtgcaatttgcg

SEQ ID NO: 352 - RNA, 19 nt, synthetic construct
  source 1..19: mol_type = other RNA
ncaaattgtgcaatttgcn

SEQ ID NO: 353 - RNA, 19 nt, synthetic construct
  source 1..19: mol_type = other RNA
ggatctttgtcatccaatt

SEQ ID NO: 354 - RNA, 19 nt, synthetic construct
  source 1..19: mol_type = other RNA
tgatctttgtcatccaatt

SEQ ID NO: 355 - RNA, 19 nt, synthetic construct
  source 1..19: mol_type = other RNA
agatctttgtcatccaatt

SEQ ID NO: 356 - RNA, 19 nt, synthetic construct
  source 1..19: mol_type = other RNA
ngatctttgtcatccaatt

SEQ ID NO: 357 - RNA, 19 nt, synthetic construct
  source 1..19: mol_type = other RNA
ngatctttgtcatccaatn

SEQ ID NO: 358 - RNA, 19 nt, synthetic construct
  source 1..19: mol_type = other RNA
gcgtcaatatgcttattca

SEQ ID NO: 359 - RNA, 19 nt, synthetic construct
  source 1..19: mol_type = other RNA
tcgtcaatatgcttattca

SEQ ID NO: 360 - RNA, 19 nt, synthetic construct
  source 1..19: mol_type = other RNA
acgtcaatatgcttattca

SEQ ID NO: 361 - RNA, 19 nt, synthetic construct
  source 1..19: mol_type = other RNA
ncgtcaatatgcttattca

SEQ ID NO: 362 - RNA, 19 nt, synthetic construct
  source 1..19: mol_type = other RNA
ncgtcaatatgcttattcn

SEQ ID NO: 363 - RNA, 19 nt, synthetic construct
  source 1..19: mol_type = other RNA
ggaatgttttgtatgcgtc

SEQ ID NO: 364 - RNA, 19 nt, synthetic construct
  source 1..19: mol_type = other RNA
tgaatgttttgtatgcgtc

SEQ ID NO: 365 - RNA, 19 nt, synthetic construct
  source 1..19: mol_type = other RNA
agaatgttttgtatgcgtc

SEQ ID NO: 366 - RNA, 19 nt, synthetic construct
  source 1..19: mol_type = other RNA
ngaatgttttgtatgcgtc

SEQ ID NO: 367 - RNA, 19 nt, synthetic construct
  source 1..19: mol_type = other RNA
ngaatgttttgtatgcgtn

SEQ ID NO: 368 - RNA, 19 nt, synthetic construct
  source 1..19: mol_type = other RNA
gattaaagattgctatgtg

SEQ ID NO: 369 - RNA, 19 nt, synthetic construct
  source 1..19: mol_type = other RNA
tattaaagattgctatgtg

SEQ ID NO: 370 - RNA, 19 nt, synthetic construct
  source 1..19: mol_type = other RNA
aattaaagattgctatgtg

SEQ ID NO: 371 - RNA, 19 nt, synthetic construct
  source 1..19: mol_type = other RNA
nattaaagattgctatgtg

SEQ ID NO: 372 - RNA, 19 nt, synthetic construct
  source 1..19: mol_type = other RNA
nattaaagattgctatgtn

SEQ ID NO: 373 - RNA, 19 nt, synthetic construct
  source 1..19: mol_type = other RNA
cacacgtccaactcagttt

SEQ ID NO: 374 - RNA, 19 nt, synthetic construct
  source 1..19: mol_type = other RNA
cacacgtccaactcagtta

SEQ ID NO: 375 - RNA, 19 nt, synthetic construct
  source 1..19: mol_type = other RNA
cacacgtccaactcagttn

SEQ ID NO: 376 - RNA, 19 nt, synthetic construct
  source 1..19: mol_type = other RNA
nacacgtccaactcagttn

SEQ ID NO: 377 - RNA, 19 nt, synthetic construct
  source 1..19: mol_type = other RNA
ttcttaagagtgcttatga

SEQ ID NO: 378 - RNA, 19 nt, synthetic construct
  source 1..19: mol_type = other RNA
ttcttaagagtgcttatgt

SEQ ID NO: 379 - RNA, 19 nt, synthetic construct
  source 1..19: mol_type = other RNA
ttcttaagagtgcttatgn

SEQ ID NO: 380 - RNA, 19 nt, synthetic construct
  source 1..19: mol_type = other RNA
ntcttaagagtgcttatgn

SEQ ID NO: 381 - RNA, 19 nt, synthetic construct
  source 1..19: mol_type = other RNA
tcttaagagtgcttatgaa

SEQ ID NO: 382 - RNA, 19 nt, synthetic construct
  source 1..19: mol_type = other RNA
tcttaagagtgcttatgat

SEQ ID NO: 383 - RNA, 19 nt, synthetic construct
  source 1..19: mol_type = other RNA
tcttaagagtgcttatgan

SEQ ID NO: 384 - RNA, 19 nt, synthetic construct
  source 1..19: mol_type = other RNA
ncttaagagtgcttatgan

SEQ ID NO: 385 - RNA, 19 nt, synthetic construct
  source 1..19: mol_type = other RNA
attaatggcaatcttcatc

SEQ ID NO: 386 - RNA, 19 nt, synthetic construct
  source 1..19: mol_type = other RNA
attaatggcaatcttcata

SEQ ID NO: 387 - RNA, 19 nt, synthetic construct
  source 1..19: mol_type = other RNA
attaatggcaatcttcatt

SEQ ID NO: 388 - RNA, 19 nt, synthetic construct
  source 1..19: mol_type = other RNA
attaatggcaatcttcatn

SEQ ID NO: 389 - RNA, 19 nt, synthetic construct
  source 1..19: mol_type = other RNA
nttaatggcaatcttcatn

SEQ ID NO: 390 - RNA, 19 nt, synthetic construct
  source 1..19: mol_type = other RNA
ctgtggttatacctactaa

SEQ ID NO: 391 - RNA, 19 nt, synthetic construct
  source 1..19: mol_type = other RNA
ctgtggttatacctactat

SEQ ID NO: 392 - RNA, 19 nt, synthetic construct
  source 1..19: mol_type = other RNA
ctgtggttatacctactan

SEQ ID NO: 393 - RNA, 19 nt, synthetic construct
  source 1..19: mol_type = other RNA
ntgtggttatacctactan

SEQ ID NO: 394 - RNA, 19 nt, synthetic construct
  source 1..19: mol_type = other RNA
acctttgacaatcttaaga

SEQ ID NO: 395 - RNA, 19 nt, synthetic construct
  source 1..19: mol_type = other RNA
acctttgacaatcttaagt

SEQ ID NO: 396 - RNA, 19 nt, synthetic construct
  source 1..19: mol_type = other RNA
acctttgacaatcttaagn

SEQ ID NO: 397 - RNA, 19 nt, synthetic construct
  source 1..19: mol_type = other RNA
ncctttgacaatcttaagn

SEQ ID NO: 398 - RNA, 19 nt, synthetic construct
  source 1..19: mol_type = other RNA
caatcttaagacacttctt

SEQ ID NO: 399 - RNA, 19 nt, synthetic construct
  source 1..19: mol_type = other RNA
caatcttaagacacttcta

SEQ ID NO: 400 - RNA, 19 nt, synthetic construct
  source 1..19: mol_type = other RNA
caatcttaagacacttctn

SEQ ID NO: 401 - RNA, 19 nt, synthetic construct
  source 1..19: mol_type = other RNA
naatcttaagacacttctn

SEQ ID NO: 402 - RNA, 19 nt, synthetic construct
  source 1..19: mol_type = other RNA
aatcttaagacacttcttt

SEQ ID NO: 403 - RNA, 19 nt, synthetic construct
  source 1..19: mol_type = other RNA
aatcttaagacacttctta

SEQ ID NO: 404 - RNA, 19 nt, synthetic construct
  source 1..19: mol_type = other RNA
aatcttaagacacttcttn

SEQ ID NO: 405 - RNA, 19 nt, synthetic construct
  source 1..19: mol_type = other RNA
natcttaagacacttcttn

SEQ ID NO: 406 - RNA, 19 nt, synthetic construct
  source 1..19: mol_type = other RNA
tgggcacactttcttatga

SEQ ID NO: 407 - RNA, 19 nt, synthetic construct
  source 1..19: mol_type = other RNA
tgggcacactttcttatgt

SEQ ID NO: 408 - RNA, 19 nt, synthetic construct
  source 1..19: mol_type = other RNA
tgggcacactttcttatgn

SEQ ID NO: 409 - RNA, 19 nt, synthetic construct
  source 1..19: mol_type = other RNA
ngggcacactttcttatgn

SEQ ID NO: 410 - RNA, 19 nt, synthetic construct
  source 1..19: mol_type = other RNA
agaaattgaccctaagttg

SEQ ID NO: 411 - RNA, 19 nt, synthetic construct
  source 1..19: mol_type = other RNA
agaaattgaccctaagtta

SEQ ID NO: 412 - RNA, 19 nt, synthetic construct
  source 1..19: mol_type = other RNA
agaaattgaccctaagttt

SEQ ID NO: 413 - RNA, 19 nt, synthetic construct
  source 1..19: mol_type = other RNA
agaaattgaccctaagttn

SEQ ID NO: 414 - RNA, 19 nt, synthetic construct
  source 1..19: mol_type = other RNA
ngaaattgaccctaagttn

SEQ ID NO: 415 - RNA, 19 nt, synthetic construct
  source 1..19: mol_type = other RNA
aagaagtagtggaaaatcc

SEQ ID NO: 416 - RNA, 19 nt, synthetic construct
  source 1..19: mol_type = other RNA
aagaagtagtggaaaatca

SEQ ID NO: 417 - RNA, 19 nt, synthetic construct
  source 1..19: mol_type = other RNA
aagaagtagtggaaaatct

SEQ ID NO: 418 - RNA, 19 nt, synthetic construct
  source 1..19: mol_type = other RNA
aagaagtagtggaaaatcn

SEQ ID NO: 419 - RNA, 19 nt, synthetic construct
  source 1..19: mol_type = other RNA
nagaagtagtggaaaatcn

SEQ ID NO: 420 - RNA, 19 nt, synthetic construct
  source 1..19: mol_type = other RNA
aagtagtggaaaatcctac

SEQ ID NO: 421 - RNA, 19 nt, synthetic construct
  source 1..19: mol_type = other RNA
aagtagtggaaaatcctaa

SEQ ID NO: 422 - RNA, 19 nt, synthetic construct
  source 1..19: mol_type = other RNA
aagtagtggaaaatcctat

SEQ ID NO: 423 - RNA, 19 nt, synthetic construct
  source 1..19: mol_type = other RNA
aagtagtggaaaatcctan

SEQ ID NO: 424 - RNA, 19 nt, synthetic construct
  source 1..19: mol_type = other RNA
nagtagtggaaaatcctan

SEQ ID NO: 425 - RNA, 19 nt, synthetic construct
  source 1..19: mol_type = other RNA
tgcttacgttaatacgttt

SEQ ID NO: 426 - RNA, 19 nt, synthetic construct
  source 1..19: mol_type = other RNA
tgcttacgttaatacgtta

SEQ ID NO: 427 - RNA, 19 nt, synthetic construct
  source 1..19: mol_type = other RNA
tgcttacgttaatacgttn

SEQ ID NO: 428 - RNA, 19 nt, synthetic construct
  source 1..19: mol_type = other RNA
ngcttacgttaatacgttn

SEQ ID NO: 429 - RNA, 19 nt, synthetic construct
  source 1..19: mol_type = other RNA
tagacaatgtcttatctac

SEQ ID NO: 430 - RNA, 19 nt, synthetic construct
  source 1..19: mol_type = other RNA
tagacaatgtcttatctaa

SEQ ID NO: 431 - RNA, 19 nt, synthetic construct
  source 1..19: mol_type = other RNA
tagacaatgtcttatctat

SEQ ID NO: 432 - RNA, 19 nt, synthetic construct
  source 1..19: mol_type = other RNA
tagacaatgtcttatctan

SEQ ID NO: 433 - RNA, 19 nt, synthetic construct
  source 1..19: mol_type = other RNA
nagacaatgtcttatctan

SEQ ID NO: 434 - RNA, 19 nt, synthetic construct
  source 1..19: mol_type = other RNA
catgtggtagtgttggttt

SEQ ID NO: 435 - RNA, 19 nt, synthetic construct
  source 1..19: mol_type = other RNA
catgtggtagtgttggtta

SEQ ID NO: 436 - RNA, 19 nt, synthetic construct
  source 1..19: mol_type = other RNA
catgtggtagtgttggttn

SEQ ID NO: 437 - RNA, 19 nt, synthetic construct
  source 1..19: mol_type = other RNA
natgtggtagtgttggttn

SEQ ID NO: 438 - RNA, 19 nt, synthetic construct
  source 1..19: mol_type = other RNA
ttttgatgttgttagacaa

SEQ ID NO: 439 - RNA, 19 nt, synthetic construct
  source 1..19: mol_type = other RNA
ttttgatgttgttagacat

SEQ ID NO: 440 - RNA, 19 nt, synthetic construct
  source 1..19: mol_type = other RNA
ttttgatgttgttagacan

SEQ ID NO: 441 - RNA, 19 nt, synthetic construct
  source 1..19: mol_type = other RNA
ntttgatgttgttagacan

SEQ ID NO: 442 - RNA, 19 nt, synthetic construct
  source 1..19: mol_type = other RNA
gtaatgctttagatcaagc

SEQ ID NO: 443 - RNA, 19 nt, synthetic construct
  source 1..19: mol_type = other RNA
gtaatgctttagatcaaga

SEQ ID NO: 444 - RNA, 19 nt, synthetic construct
  source 1..19: mol_type = other RNA
gtaatgctttagatcaagt

SEQ ID NO: 445 - RNA, 19 nt, synthetic construct
  source 1..19: mol_type = other RNA
gtaatgctttagatcaagn

SEQ ID NO: 446 - RNA, 19 nt, synthetic construct
  source 1..19: mol_type = other RNA
ntaatgctttagatcaagn

SEQ ID NO: 447 - RNA, 19 nt, synthetic construct
  source 1..19: mol_type = other RNA
agctatgacccaaatgtat

SEQ ID NO: 448 - RNA, 19 nt, synthetic construct
  source 1..19: mol_type = other RNA
agctatgacccaaatgtaa

SEQ ID NO: 449 - RNA, 19 nt, synthetic construct
  source 1..19: mol_type = other RNA
agctatgacccaaatgtan

SEQ ID NO: 450 - RNA, 19 nt, synthetic construct
  source 1..19: mol_type = other RNA
ngctatgacccaaatgtan

SEQ ID NO: 451 - RNA, 19 nt, synthetic construct
  source 1..19: mol_type = other RNA
catggtaccacatatatca

SEQ ID NO: 452 - RNA, 19 nt, synthetic construct
  source 1..19: mol_type = other RNA
catggtaccacatatatct

SEQ ID NO: 453 - RNA, 19 nt, synthetic construct
  source 1..19: mol_type = other RNA
catggtaccacatatatcn

SEQ ID NO: 454 - RNA, 19 nt, synthetic construct
  source 1..19: mol_type = other RNA
natggtaccacatatatcn

SEQ ID NO: 455 - RNA, 19 nt, synthetic construct
  source 1..19: mol_type = other RNA
atggtaccacatatatcac

SEQ ID NO: 456 - RNA, 19 nt, synthetic construct
  source 1..19: mol_type = other RNA
atggtaccacatatatcaa

SEQ ID NO: 457 - RNA, 19 nt, synthetic construct
  source 1..19: mol_type = other RNA
atggtaccacatatatcat

SEQ ID NO: 458 - RNA, 19 nt, synthetic construct
  source 1..19: mol_type = other RNA
atggtaccacatatatcan

SEQ ID NO: 459 - RNA, 19 nt, synthetic construct
  source 1..19: mol_type = other RNA
ntggtaccacatatatcan

SEQ ID NO: 460 - RNA, 19 nt, synthetic construct
  source 1..19: mol_type = other RNA
actgacattagataatcaa

SEQ ID NO: 461 - RNA, 19 nt, synthetic construct
  source 1..19: mol_type = other RNA
actgacattagataatcat

SEQ ID NO: 462 - RNA, 19 nt, synthetic construct
  source 1..19: mol_type = other RNA
actgacattagataatcan

SEQ ID NO: 463 - RNA, 19 nt, synthetic construct
  source 1..19: mol_type = other RNA
nctgacattagataatcan

SEQ ID NO: 464 - RNA, 19 nt, synthetic construct
  source 1..19: mol_type = other RNA
tacataatcaggatgtaaa

SEQ ID NO: 465 - RNA, 19 nt, synthetic construct
  source 1..19: mol_type = other RNA
tacataatcaggatgtaat

SEQ ID NO: 466 - RNA, 19 nt, synthetic construct
  source 1..19: mol_type = other RNA
tacataatcaggatgtaan

SEQ ID NO: 467 - RNA, 19 nt, synthetic construct
  source 1..19: mol_type = other RNA
nacataatcaggatgtaan

SEQ ID NO: 468 - RNA, 19 nt, synthetic construct
  source 1..19: mol_type = other RNA
ataatcaggatgtaaactt

SEQ ID NO: 469 - RNA, 19 nt, synthetic construct
  source 1..19: mol_type = other RNA
ataatcaggatgtaaacta

SEQ ID NO: 470 - RNA, 19 nt, synthetic construct
  source 1..19: mol_type = other RNA
ataatcaggatgtaaactn

SEQ ID NO: 471 - RNA, 19 nt, synthetic construct
  source 1..19: mol_type = other RNA
ntaatcaggatgtaaactn

SEQ ID NO: 472 - RNA, 19 nt, synthetic construct
  source 1..19: mol_type = other RNA
taatcaggatgtaaactta

SEQ ID NO: 473 - RNA, 19 nt, synthetic construct
  source 1..19: mol_type = other RNA
taatcaggatgtaaacttt

SEQ ID NO: 474 - RNA, 19 nt, synthetic construct
  source 1..19: mol_type = other RNA
taatcaggatgtaaacttn

SEQ ID NO: 475 - RNA, 19 nt, synthetic construct
  source 1..19: mol_type = other RNA
naatcaggatgtaaacttn

SEQ ID NO: 476 - RNA, 19 nt, synthetic construct
  source 1..19: mol_type = other RNA
atgtaaacttacatagctc

SEQ ID NO: 477 - RNA, 19 nt, synthetic construct
  source 1..19: mol_type = other RNA
atgtaaacttacatagcta

SEQ ID NO: 478 - RNA, 19 nt, synthetic construct
  source 1..19: mol_type = other RNA
atgtaaacttacatagctt

SEQ ID NO: 479 - RNA, 19 nt, synthetic construct
  source 1..19: mol_type = other RNA
atgtaaacttacatagctn

SEQ ID NO: 480 - RNA, 19 nt, synthetic construct
  source 1..19: mol_type = other RNA
ntgtaaacttacatagctn

SEQ ID NO: 481 - RNA, 19 nt, synthetic construct
  source 1..19: mol_type = other RNA
taaggctagactttattat

SEQ ID NO: 482 - RNA, 19 nt, synthetic construct
  source 1..19: mol_type = other RNA
taaggctagactttattaa

SEQ ID NO: 483 - RNA, 19 nt, synthetic construct
  source 1..19: mol_type = other RNA
taaggctagactttattan

SEQ ID NO: 484 - RNA, 19 nt, synthetic construct
  source 1..19: mol_type = other RNA
naaggctagactttattan

SEQ ID NO: 485 - RNA, 19 nt, synthetic construct
  source 1..19: mol_type = other RNA
gtgtctctatctgtagtac

SEQ ID NO: 486 - RNA, 19 nt, synthetic construct
  source 1..19: mol_type = other RNA
gtgtctctatctgtagtaa

SEQ ID NO: 487 - RNA, 19 nt, synthetic construct
  source 1..19: mol_type = other RNA
gtgtctctatctgtagtat

SEQ ID NO: 488 - RNA, 19 nt, synthetic construct
  source 1..19: mol_type = other RNA
gtgtctctatctgtagtan

SEQ ID NO: 489 - RNA, 19 nt, synthetic construct
  source 1..19: mol_type = other RNA
ntgtctctatctgtagtan

SEQ ID NO: 490 - RNA, 19 nt, synthetic construct
  source 1..19: mol_type = other RNA
ctctatctgtagtactatg

SEQ ID NO: 491 - RNA, 19 nt, synthetic construct
  source 1..19: mol_type = other RNA
ctctatctgtagtactata

SEQ ID NO: 492 - RNA, 19 nt, synthetic construct
  source 1..19: mol_type = other RNA
ctctatctgtagtactatt

SEQ ID NO: 493 - RNA, 19 nt, synthetic construct
  source 1..19: mol_type = other RNA
ctctatctgtagtactatn

SEQ ID NO: 494 - RNA, 19 nt, synthetic construct
  source 1..19: mol_type = other RNA
ntctatctgtagtactatn

SEQ ID NO: 495 - RNA, 19 nt, synthetic construct
  source 1..19: mol_type = other RNA
tctatctgtagtactatga

SEQ ID NO: 496 - RNA, 19 nt, synthetic construct
  source 1..19: mol_type = other RNA
tctatctgtagtactatgt

SEQ ID NO: 497 - RNA, 19 nt, synthetic construct
  source 1..19: mol_type = other RNA
tctatctgtagtactatgn

SEQ ID NO: 498 - RNA, 19 nt, synthetic construct
  source 1..19: mol_type = other RNA
nctatctgtagtactatgn

SEQ ID NO: 499 - RNA, 19 nt, synthetic construct
  source 1..19: mol_type = other RNA
tatctgtagtactatgacc

SEQ ID NO: 500 - RNA, 19 nt, synthetic construct
  source 1..19: mol_type = other RNA
tatctgtagtactatgaca

SEQ ID NO: 501 - RNA, 19 nt, synthetic construct
  source 1..19: mol_type = other RNA
tatctgtagtactatgact

SEQ ID NO: 502 - RNA, 19 nt, synthetic construct
  source 1..19: mol_type = other RNA
tatctgtagtactatgacn

SEQ ID NO: 503 - RNA, 19 nt, synthetic construct
  source 1..19: mol_type = other RNA
natctgtagtactatgacn

SEQ ID NO: 504 - RNA, 19 nt, synthetic construct
  source 1..19: mol_type = other RNA
atacaatgctagttaaaca

SEQ ID NO: 505 - RNA, 19 nt, synthetic construct
  source 1..19: mol_type = other RNA
atacaatgctagttaaact

SEQ ID NO: 506 - RNA, 19 nt, synthetic construct
  source 1..19: mol_type = other RNA
atacaatgctagttaaacn

SEQ ID NO: 507 - RNA, 19 nt, synthetic construct
  source 1..19: mol_type = other RNA
ntacaatgctagttaaacn

SEQ ID NO: 508 - RNA, 19 nt, synthetic construct
  source 1..19: mol_type = other RNA
tacaatgctagttaaacag

SEQ ID NO: 509 - RNA, 19 nt, synthetic construct
  source 1..19: mol_type = other RNA
tacaatgctagttaaacaa

SEQ ID NO: 510 - RNA, 19 nt, synthetic construct
  source 1..19: mol_type = other RNA
tacaatgctagttaaacat

SEQ ID NO: 511 - RNA, 19 nt, synthetic construct
  source 1..19: mol_type = other RNA
tacaatgctagttaaacan

SEQ ID NO: 512 - RNA, 19 nt, synthetic construct
  source 1..19: mol_type = other RNA
nacaatgctagttaaacan

SEQ ID NO: 513 - RNA, 19 nt, synthetic construct
  source 1..19: mol_type = other RNA
ctagcaatgttgcaaatta

SEQ ID NO: 514 - RNA, 19 nt, synthetic construct
  source 1..19: mol_type = other RNA
ctagcaatgttgcaaattt

SEQ ID NO: 515 - RNA, 19 nt, synthetic construct
  source 1..19: mol_type = other RNA
ctagcaatgttgcaaattn

SEQ ID NO: 516 - RNA, 19 nt, synthetic construct
  source 1..19: mol_type = other RNA
ntagcaatgttgcaaattn

SEQ ID NO: 517 - RNA, 19 nt, synthetic construct
  source 1..19: mol_type = other RNA
gcataatgtctgatagaga

SEQ ID NO: 518 - RNA, 19 nt, synthetic construct
  source 1..19: mol_type = other RNA
gcataatgtctgatagagt

SEQ ID NO: 519 - RNA, 19 nt, synthetic construct
  source 1..19: mol_type = other RNA
gcataatgtctgatagagn

SEQ ID NO: 520 - RNA, 19 nt, synthetic construct
  source 1..19: mol_type = other RNA
ncataatgtctgatagagn

SEQ ID NO: 521 - RNA, 19 nt, synthetic construct
  source 1..19: mol_type = other RNA
agactcatctctatgatgg

SEQ ID NO: 522 - RNA, 19 nt, synthetic construct
  source 1..19: mol_type = other RNA
agactcatctctatgatga

SEQ ID NO: 523 - RNA, 19 nt, synthetic construct
  source 1..19: mol_type = other RNA
agactcatctctatgatgt

SEQ ID NO: 524 - RNA, 19 nt, synthetic construct
  source 1..19: mol_type = other RNA
agactcatctctatgatgn

SEQ ID NO: 525 - RNA, 19 nt, synthetic construct
  source 1..19: mol_type = other RNA
ngactcatctctatgatgn

SEQ ID NO: 526 - RNA, 19 nt, synthetic construct
  source 1..19: mol_type = other RNA
ggagtcacattaattggag

SEQ ID NO: 527 - RNA, 19 nt, synthetic construct
  source 1..19: mol_type = other RNA
ggagtcacattaattggaa

SEQ ID NO: 528 - RNA, 19 nt, synthetic construct
  source 1..19: mol_type = other RNA
ggagtcacattaattggat

SEQ ID NO: 529 - RNA, 19 nt, synthetic construct
  source 1..19: mol_type = other RNA
ggagtcacattaattggan

SEQ ID NO: 530 - RNA, 19 nt, synthetic construct
  source 1..19: mol_type = other RNA
ngagtcacattaattggan

SEQ ID NO: 531 - RNA, 19 nt, synthetic construct
  source 1..19: mol_type = other RNA
tcgattcagatcttaatga

SEQ ID NO: 532 - RNA, 19 nt, synthetic construct
  source 1..19: mol_type = other RNA
tcgattcagatcttaatgt

SEQ ID NO: 533 - RNA, 19 nt, synthetic construct
  source 1..19: mol_type = other RNA
tcgattcagatcttaatgn

SEQ ID NO: 534 - RNA, 19 nt, synthetic construct
  source 1..19: mol_type = other RNA
ncgattcagatcttaatgn

SEQ ID NO: 535 - RNA, 19 nt, synthetic construct
  source 1..19: mol_type = other RNA
atgagtacgaacttatgta

SEQ ID NO: 536 - RNA, 19 nt, synthetic construct
  source 1..19: mol_type = other RNA
atgagtacgaacttatgtt

SEQ ID NO: 537 - RNA, 19 nt, synthetic construct
  source 1..19: mol_type = other RNA
atgagtacgaacttatgtn

SEQ ID NO: 538 - RNA, 19 nt, synthetic construct
  source 1..19: mol_type = other RNA
ntgagtacgaacttatgtn

SEQ ID NO: 539 - RNA, 19 nt, synthetic construct
  source 1..19: mol_type = other RNA
gaacttatgtactcattcg

SEQ ID NO: 540 - RNA, 19 nt, synthetic construct
  source 1..19: mol_type = other RNA
gaacttatgtactcattca

SEQ ID NO: 541 - RNA, 19 nt, synthetic construct
  source 1..19: mol_type = other RNA
gaacttatgtactcattct

SEQ ID NO: 542 - RNA, 19 nt, synthetic construct
  source 1..19: mol_type = other RNA
gaacttatgtactcattcn

SEQ ID NO: 543 - RNA, 19 nt, synthetic construct
  source 1..19: mol_type = other RNA
naacttatgtactcattcn

SEQ ID NO: 544 - RNA, 19 nt, synthetic construct
  source 1..19: mol_type = other RNA
aacttatgtactcattcgt

SEQ ID NO: 545 - RNA, 19 nt, synthetic construct
  source 1..19: mol_type = other RNA
aacttatgtactcattcga

SEQ ID NO: 546 - RNA, 19 nt, synthetic construct
  source 1..19: mol_type = other RNA
aacttatgtactcattcgn

SEQ ID NO: 547 - RNA, 19 nt, synthetic construct
  source 1..19: mol_type = other RNA
nacttatgtactcattcgn

SEQ ID NO: 548 - RNA, 19 nt, synthetic construct
  source 1..19: mol_type = other RNA
tatgtactcattcgtttcg

SEQ ID NO: 549 - RNA, 19 nt, synthetic construct
  source 1..19: mol_type = other RNA
tatgtactcattcgtttca

SEQ ID NO: 550 - RNA, 19 nt, synthetic construct
  source 1..19: mol_type = other RNA
tatgtactcattcgtttct

SEQ ID NO: 551 - RNA, 19 nt, synthetic construct
  source 1..19: mol_type = other RNA
tatgtactcattcgtttcn

SEQ ID NO: 552 - RNA, 19 nt, synthetic construct
  source 1..19: mol_type = other RNA
natgtactcattcgtttcn

SEQ ID NO: 553 - RNA, 19 nt, synthetic construct
  source 1..19: mol_type = other RNA
agttaatagcgtacttctt

SEQ ID NO: 554 - RNA, 19 nt, synthetic construct
  source 1..19: mol_type = other RNA
agttaatagcgtacttcta

SEQ ID NO: 555 - RNA, 19 nt, synthetic construct
  source 1..19: mol_type = other RNA
agttaatagcgtacttctn

SEQ ID NO: 556 - RNA, 19 nt, synthetic construct
  source 1..19: mol_type = other RNA
ngttaatagcgtacttctn

SEQ ID NO: 557 - RNA, 19 nt, synthetic construct
  source 1..19: mol_type = other RNA
ttgctttcgtggtattctt

SEQ ID NO: 558 - RNA, 19 nt, synthetic construct
  source 1..19: mol_type = other RNA
ttgctttcgtggtattcta

SEQ ID NO: 559 - RNA, 19 nt, synthetic construct
  source 1..19: mol_type = other RNA
ttgctttcgtggtattctn

SEQ ID NO: 560 - RNA, 19 nt, synthetic construct
  source 1..19: mol_type = other RNA
ntgctttcgtggtattctn

SEQ ID NO: 561 - RNA, 19 nt, synthetic construct
  source 1..19: mol_type = other RNA
acactagccatccttactg

SEQ ID NO: 562 - RNA, 19 nt, synthetic construct
  source 1..19: mol_type = other RNA
acactagccatccttacta

SEQ ID NO: 563 - RNA, 19 nt, synthetic construct
  source 1..19: mol_type = other RNA
acactagccatccttactt

SEQ ID NO: 564 - RNA, 19 nt, synthetic construct
  source 1..19: mol_type = other RNA
acactagccatccttactn

SEQ ID NO: 565 - RNA, 19 nt, synthetic construct
  source 1..19: mol_type = other RNA
ncactagccatccttactn

SEQ ID NO: 566 - RNA, 19 nt, synthetic construct
  source 1..19: mol_type = other RNA
actgctgcaatattgttaa

SEQ ID NO: 567 - RNA, 19 nt, synthetic construct
  source 1..19: mol_type = other RNA
actgctgcaatattgttat

SEQ ID NO: 568 - RNA, 19 nt, synthetic construct
  source 1..19: mol_type = other RNA
actgctgcaatattgttan

SEQ ID NO: 569 - RNA, 19 nt, synthetic construct
  source 1..19: mol_type = other RNA
nctgctgcaatattgttan

SEQ ID NO: 570 - RNA, 19 nt, synthetic construct
  source 1..19: mol_type = other RNA
gctgcaatattgttaacgt

SEQ ID NO: 571 - RNA, 19 nt, synthetic construct
  source 1..19: mol_type = other RNA
gctgcaatattgttaacga

SEQ ID NO: 572 - RNA, 19 nt, synthetic construct
  source 1..19: mol_type = other RNA
gctgcaatattgttaacgn

SEQ ID NO: 573 - RNA, 19 nt, synthetic construct
  source 1..19: mol_type = other RNA
nctgcaatattgttaacgn

SEQ ID NO: 574 - RNA, 19 nt, synthetic construct
  source 1..19: mol_type = other RNA
ctgcaatattgttaacgtg

SEQ ID NO: 575 - RNA, 19 nt, synthetic construct
  source 1..19: mol_type = other RNA
ctgcaatattgttaacgta

SEQ ID NO: 576 - RNA, 19 nt, synthetic construct
  source 1..19: mol_type = other RNA
ctgcaatattgttaacgtt

SEQ ID NO: 577 - RNA, 19 nt, synthetic construct
  source 1..19: mol_type = other RNA
ctgcaatattgttaacgtn

SEQ ID NO: 578 - RNA, 19 nt, synthetic construct
  source 1..19: mol_type = other RNA
ntgcaatattgttaacgtn

SEQ ID NO: 579 - RNA, 19 nt, synthetic construct
  source 1..19: mol_type = other RNA
tgatcttctggtctaaacg

SEQ ID NO: 580 - RNA, 19 nt, synthetic construct
  source 1..19: mol_type = other RNA
tgatcttctggtctaaaca

SEQ ID NO: 581 - RNA, 19 nt, synthetic construct
  source 1..19: mol_type = other RNA
tgatcttctggtctaaact

SEQ ID NO: 582 - RNA, 19 nt, synthetic construct
  source 1..19: mol_type = other RNA
tgatcttctggtctaaacn

SEQ ID NO: 583 - RNA, 19 nt, synthetic construct
  source 1..19: mol_type = other RNA
ngatcttctggtctaaacn

SEQ ID NO: 584 - RNA, 19 nt, synthetic construct
  source 1..19: mol_type = other RNA
tcacgaacgctttcttatt

SEQ ID NO: 585 - RNA, 19 nt, synthetic construct
  source 1..19: mol_type = other RNA
tcacgaacgctttcttata

SEQ ID NO: 586 - RNA, 19 nt, synthetic construct
  source 1..19: mol_type = other RNA
tcacgaacgctttcttatn

SEQ ID NO: 587 - RNA, 19 nt, synthetic construct
  source 1..19: mol_type = other RNA
ncacgaacgctttcttatn

SEQ ID NO: 588 - RNA, 19 nt, synthetic construct
  source 1..19: mol_type = other RNA
aacgctttcttattacaaa

SEQ ID NO: 589 - RNA, 19 nt, synthetic construct
  source 1..19: mol_type = other RNA
aacgctttcttattacaat

SEQ ID NO: 590 - RNA, 19 nt, synthetic construct
  source 1..19: mol_type = other RNA
aacgctttcttattacaan

SEQ ID NO: 591 - RNA, 19 nt, synthetic construct
  source 1..19: mol_type = other RNA
nacgctttcttattacaan

SEQ ID NO: 592 - RNA, 19 nt, synthetic construct
  source 1..19: mol_type = other RNA
cagtaagtgacaacagatg

SEQ ID NO: 593 - RNA, 19 nt, synthetic construct
  source 1..19: mol_type = other RNA
cagtaagtgacaacagata

SEQ ID NO: 594 - RNA, 19 nt, synthetic construct
  source 1..19: mol_type = other RNA
cagtaagtgacaacagatt

SEQ ID NO: 595 - RNA, 19 nt, synthetic construct
  source 1..19: mol_type = other RNA
cagtaagtgacaacagatn

SEQ ID NO: 596 - RNA, 19 nt, synthetic construct
  source 1..19: mol_type = other RNA
nagtaagtgacaacagatn

SEQ ID NO: 597 - RNA, 19 nt, synthetic construct
  source 1..19: mol_type = other RNA
gtaagtgacaacagatgtt

SEQ ID NO: 598 - RNA, 19 nt, synthetic construct
  source 1..19: mol_type = other RNA
gtaagtgacaacagatgta

SEQ ID NO: 599 - RNA, 19 nt, synthetic construct
  source 1..19: mol_type = other RNA
gtaagtgacaacagatgtn

SEQ ID NO: 600 - RNA, 19 nt, synthetic construct
  source 1..19: mol_type = other RNA
ntaagtgacaacagatgtn

SEQ ID NO: 601 - RNA, 19 nt, synthetic construct
  source 1..19: mol_type = other RNA
aggaagaccttaaattccc

SEQ ID NO: 602 - RNA, 19 nt, synthetic construct
  source 1..19: mol_type = other RNA
aggaagaccttaaattcca

SEQ ID NO: 603 - RNA, 19 nt, synthetic construct
  source 1..19: mol_type = other RNA
aggaagaccttaaattcct

SEQ ID NO: 604 - RNA, 19 nt, synthetic construct
  source 1..19: mol_type = other RNA
aggaagaccttaaattccn

SEQ ID NO: 605 - RNA, 19 nt, synthetic construct
  source 1..19: mol_type = other RNA
nggaagaccttaaattccn

SEQ ID NO: 606 - RNA, 19 nt, synthetic construct
  source 1..19: mol_type = other RNA
ccaattaacaccaatagca

SEQ ID NO: 607 - RNA, 19 nt, synthetic construct
  source 1..19: mol_type = other RNA
ccaattaacaccaatagct

SEQ ID NO: 608 - RNA, 19 nt, synthetic construct
  source 1..19: mol_type = other RNA
ccaattaacaccaatagcn

SEQ ID NO: 609 - RNA, 19 nt, synthetic construct
  source 1..19: mol_type = other RNA
ncaattaacaccaatagcn

SEQ ID NO: 610 - RNA, 19 nt, synthetic construct
  source 1..19: mol_type = other RNA
tccagatgaccaaattggc

SEQ ID NO: 611 - RNA, 19 nt, synthetic construct
  source 1..19: mol_type = other RNA
tccagatgaccaaattgga

SEQ ID NO: 612 - RNA, 19 nt, synthetic construct
  source 1..19: mol_type = other RNA
tccagatgaccaaattggt

SEQ ID NO: 613 - RNA, 19 nt, synthetic construct
  source 1..19: mol_type = other RNA
tccagatgaccaaattggn

SEQ ID NO: 614 - RNA, 19 nt, synthetic construct
  source 1..19: mol_type = other RNA
nccagatgaccaaattggn

SEQ ID NO: 615 - RNA, 19 nt, synthetic construct
  source 1..19: mol_type = other RNA
ccaagatggtatttctact

SEQ ID NO: 616 - RNA, 19 nt, synthetic construct
  source 1..19: mol_type = other RNA
ccaagatggtatttctaca

SEQ ID NO: 617 - RNA, 19 nt, synthetic construct
  source 1..19: mol_type = other RNA
ccaagatggtatttctacn

SEQ ID NO: 618 - RNA, 19 nt, synthetic construct
  source 1..19: mol_type = other RNA
ncaagatggtatttctacn

SEQ ID NO: 619 - RNA, 19 nt, synthetic construct
  source 1..19: mol_type = other RNA
agatggtatttctactacc

SEQ ID NO: 620 - RNA, 19 nt, synthetic construct
  source 1..19: mol_type = other RNA
agatggtatttctactaca

SEQ ID NO: 621 - RNA, 19 nt, synthetic construct
  source 1..19: mol_type = other RNA
agatggtatttctactact

SEQ ID NO: 622 - RNA, 19 nt, synthetic construct
  source 1..19: mol_type = other RNA
agatggtatttctactacn

SEQ ID NO: 623 - RNA, 19 nt, synthetic construct
  source 1..19: mol_type = other RNA
ngatggtatttctactacn

SEQ ID NO: 624 - RNA, 19 nt, synthetic construct
  source 1..19: mol_type = other RNA
gaatacaccaaaagatcac

SEQ ID NO: 625 - RNA, 19 nt, synthetic construct
  source 1..19: mol_type = other RNA
gaatacaccaaaagatcaa

SEQ ID NO: 626 - RNA, 19 nt, synthetic construct
  source 1..19: mol_type = other RNA
gaatacaccaaaagatcat

SEQ ID NO: 627 - RNA, 19 nt, synthetic construct
  source 1..19: mol_type = other RNA
gaatacaccaaaagatcan

SEQ ID NO: 628 - RNA, 19 nt, synthetic construct
  source 1..19: mol_type = other RNA
naatacaccaaaagatcan

SEQ ID NO: 629 - RNA, 19 nt, synthetic construct
  source 1..19: mol_type = other RNA
gtcactaagaaatctgctg

SEQ ID NO: 630 - RNA, 19 nt, synthetic construct
  source 1..19: mol_type = other RNA
gtcactaagaaatctgcta

SEQ ID NO: 631 - RNA, 19 nt, synthetic construct
  source 1..19: mol_type = other RNA
gtcactaagaaatctgctt

SEQ ID NO: 632 - RNA, 19 nt, synthetic construct
  source 1..19: mol_type = other RNA
gtcactaagaaatctgctn

SEQ ID NO: 633 - RNA, 19 nt, synthetic construct
  source 1..19: mol_type = other RNA
ntcactaagaaatctgctn

SEQ ID NO: 634 - RNA, 19 nt, synthetic construct
  source 1..19: mol_type = other RNA
actaaagcatacaatgtaa

SEQ ID NO: 635 - RNA, 19 nt, synthetic construct
  source 1..19: mol_type = other RNA
actaaagcatacaatgtat

SEQ ID NO: 636 - RNA, 19 nt, synthetic construct
  source 1..19: mol_type = other RNA
actaaagcatacaatgtan

SEQ ID NO: 637 - RNA, 19 nt, synthetic construct
  source 1..19: mol_type = other RNA
nctaaagcatacaatgtan

SEQ ID NO: 638 - RNA, 19 nt, synthetic construct
  source 1..19: mol_type = other RNA
agacaaggaactgattaca

SEQ ID NO: 639 - RNA, 19 nt, synthetic construct
  source 1..19: mol_type = other RNA
agacaaggaactgattact

SEQ ID NO: 640 - RNA, 19 nt, synthetic construct
  source 1..19: mol_type = other RNA
agacaaggaactgattacn

SEQ ID NO: 641 - RNA, 19 nt, synthetic construct
  source 1..19: mol_type = other RNA
ngacaaggaactgattacn

SEQ ID NO: 642 - RNA, 19 nt, synthetic construct
  source 1..19: mol_type = other RNA
acaaggaactgattacaaa

SEQ ID NO: 643 - RNA, 19 nt, synthetic construct
  source 1..19: mol_type = other RNA
acaaggaactgattacaat

SEQ ID NO: 644 - RNA, 19 nt, synthetic construct
  source 1..19: mol_type = other RNA
acaaggaactgattacaan

SEQ ID NO: 645 - RNA, 19 nt, synthetic construct
  source 1..19: mol_type = other RNA
ncaaggaactgattacaan

SEQ ID NO: 646 - RNA, 19 nt, synthetic construct
  source 1..19: mol_type = other RNA
aactgattacaaacattgg

SEQ ID NO: 647 - RNA, 19 nt, synthetic construct
  source 1..19: mol_type = other RNA
aactgattacaaacattga

SEQ ID NO: 648 - RNA, 19 nt, synthetic construct
  source 1..19: mol_type = other RNA
aactgattacaaacattgt

SEQ ID NO: 649 - RNA, 19 nt, synthetic construct
  source 1..19: mol_type = other RNA
aactgattacaaacattgn

SEQ ID NO: 650 - RNA, 19 nt, synthetic construct
  source 1..19: mol_type = other RNA
nactgattacaaacattgn

SEQ ID NO: 651 - RNA, 19 nt, synthetic construct
  source 1..19: mol_type = other RNA
cgcaaattgcacaatttgc

SEQ ID NO: 652 - RNA, 19 nt, synthetic construct
  source 1..19: mol_type = other RNA
cgcaaattgcacaatttga

SEQ ID NO: 653 - RNA, 19 nt, synthetic construct
  source 1..19: mol_type = other RNA
cgcaaattgcacaatttgt

SEQ ID NO: 654 - RNA, 19 nt, synthetic construct
  source 1..19: mol_type = other RNA
cgcaaattgcacaatttgn

SEQ ID NO: 655 - RNA, 19 nt, synthetic construct
  source 1..19: mol_type = other RNA
ngcaaattgcacaatttgn

SEQ ID NO: 656 - RNA, 19 nt, synthetic construct
  source 1..19: mol_type = other RNA
aattggatgacaaagatcc

SEQ ID NO: 657 - RNA, 19 nt, synthetic construct
  source 1..19: mol_type = other RNA
aattggatgacaaagatca

SEQ ID NO: 658 - RNA, 19 nt, synthetic construct
  source 1..19: mol_type = other RNA
aattggatgacaaagatct

SEQ ID NO: 659 - RNA, 19 nt, synthetic construct
  source 1..19: mol_type = other RNA
aattggatgacaaagatcn

SEQ ID NO: 660 - RNA, 19 nt, synthetic construct
  source 1..19: mol_type = other RNA
nattggatgacaaagatcn

SEQ ID NO: 661 - RNA, 19 nt, synthetic construct
  source 1..19: mol_type = other RNA
tgaataagcatattgacgc

SEQ ID NO: 662 - RNA, 19 nt, synthetic construct
  source 1..19: mol_type = other RNA
tgaataagcatattgacga

SEQ ID NO: 663 - RNA, 19 nt, synthetic construct
  source 1..19: mol_type = other RNA
tgaataagcatattgacgt

SEQ ID NO: 664 - RNA, 19 nt, synthetic construct
  source 1..19: mol_type = other RNA
tgaataagcatattgacgn

SEQ ID NO: 665 - RNA, 19 nt, synthetic construct
  source 1..19: mol_type = other RNA
ngaataagcatattgacgn

SEQ ID NO: 666 - RNA, 19 nt, synthetic construct
  source 1..19: mol_type = other RNA
gacgcatacaaaacattcc

SEQ ID NO: 667 - RNA, 19 nt, synthetic construct
  source 1..19: mol_type = other RNA
gacgcatacaaaacattca

SEQ ID NO: 668 - RNA, 19 nt, synthetic construct
  source 1..19: mol_type = other RNA
gacgcatacaaaacattct

SEQ ID NO: 669 - RNA, 19 nt, synthetic construct
  source 1..19: mol_type = other RNA
gacgcatacaaaacattcn

SEQ ID NO: 670 - RNA, 19 nt, synthetic construct
  source 1..19: mol_type = other RNA
nacgcatacaaaacattcn

SEQ ID NO: 671 - RNA, 19 nt, synthetic construct
  source 1..19: mol_type = other RNA
cacatagcaatctttaatc

SEQ ID NO: 672 - RNA, 19 nt, synthetic construct
  source 1..19: mol_type = other RNA
cacatagcaatctttaata

SEQ ID NO: 673 - RNA, 19 nt, synthetic construct
  source 1..19: mol_type = other RNA
cacatagcaatctttaatt

SEQ ID NO: 674 - RNA, 19 nt, synthetic construct
  source 1..19: mol_type = other RNA
cacatagcaatctttaatn

SEQ ID NO: 675 - RNA, 19 nt, synthetic construct
  source 1..19: mol_type = other RNA
nacatagcaatctttaatn

SEQ ID NO: 676 - RNA, 21 nt, synthetic construct
  modified_base 1: mod_base = OTHER; note = 2'-O-methyladenosine
  modified_base 1^2: mod_base = OTHER; note = phosphorothioate linkage
  modified_base 2: mod_base = OTHER; note = 2'-fluoroadenosine
  modified_base 2^3: mod_base = OTHER; note = phosphorothioate linkage
  modified_base 3: mod_base = OTHER; note = 2'-O-methyladenosine
  modified_base 3^4: mod_base = OTHER; note = phosphorothioate linkage
  modified_base 4: mod_base = OTHER; note = 2'-fluorocytidine
  modified_base 5: mod_base = um
  modified_base 6: mod_base = OTHER; note = 2'-fluoroguanosine
  modified_base 7: mod_base = OTHER; note = 2'-O-methyladenosine
  modified_base 8: mod_base = OTHER; note = 2'-fluoroguanosine
  modified_base 9: mod_base = um
  modified_base 10: mod_base = OTHER; note = 2'-fluorouridine
  modified_base 11: mod_base = gm
  modified_base 12: mod_base = OTHER; note = 2'-fluoroguanosine
  modified_base 13: mod_base = OTHER; note = 2'-O-methyladenosine
  modified_base 14: mod_base = OTHER; note = 2'-fluorocytidine
  modified_base 15: mod_base = gm
  modified_base 16: mod_base = OTHER; note = 2'-fluorouridine
  modified_base 17: mod_base = gm
  modified_base 18: mod_base = OTHER; note = 2'-fluorouridine
  modified_base 19: mod_base = gm
  modified_base 20: mod_base = OTHER; note = 2'-fluorouridine
  modified_base 20^21: mod_base = OTHER; note = phosphorothioate linkage
  modified_base 21: mod_base = cm
  source 1..21: mol_type = other RNA
aaactgagttggacgtgtgtc

SEQ ID NO: 677 - RNA, 21 nt, synthetic construct
  modified_base 1: mod_base = um
  modified_base 1^2: mod_base = OTHER; note = phosphorothioate linkage
  modified_base 2: mod_base = OTHER; note = 2'-fluoroguanosine
  modified_base 2^3: mod_base = OTHER; note = phosphorothioate linkage
  modified_base 3: mod_base = OTHER; note = 2'-O-methyladenosine
  modified_base 3^4: mod_base = OTHER; note = phosphorothioate linkage
  modified_base 4: mod_base = OTHER; note = 2'-fluorouridine
  modified_base 5: mod_base = um
  modified_base 6: mod_base = OTHER; note = 2'-fluorouridine
  modified_base 7: mod_base = um
  modified_base 8: mod_base = OTHER; note = 2'-fluorocytidine
  modified_base 9: mod_base = cm
  modified_base 10: mod_base = OTHER; note = 2'-fluoroadenosine
  modified_base 11: mod_base = cm
  modified_base 12: mod_base = OTHER; note = 2'-fluorouridine
  modified_base 13: mod_base = OTHER; note = 2'-O-methyladenosine
  modified_base 14: mod_base = OTHER; note = 2'-fluorocytidine
  modified_base 15: mod_base = um
  modified_base 16: mod_base = OTHER; note = 2'-fluorouridine
  modified_base 17: mod_base = cm
  modified_base 18: mod_base = OTHER; note = 2'-fluorouridine
  modified_base 19: mod_base = um
  modified_base 20: mod_base = OTHER; note = 2'-fluorocytidine
  modified_base 20^21: mod_base = OTHER; note = phosphorothioate linkage
  modified_base 21: mod_base = cm
  source 1..21: mol_type = other RNA
tgattttccactacttcttcc

SEQ ID NO: 678 - RNA, 21 nt, synthetic construct
  modified_base 1: mod_base = um
  modified_base 1^2: mod_base = OTHER; note = phosphorothioate linkage
  modified_base 2: mod_base = OTHER; note = 2'-fluorouridine
  modified_base 2^3: mod_base = OTHER; note = phosphorothioate linkage
  modified_base 3: mod_base = OTHER; note = 2'-O-methyladenosine
  modified_base 3^4: mod_base = OTHER; note = phosphorothioate linkage
  modified_base 4: mod_base = OTHER; note = 2'-fluoroguanosine
  modified_base 5: mod_base = gm
  modified_base 6: mod_base = OTHER; note = 2'-fluoroadenosine
  modified_base 7: mod_base = um
  modified_base 8: mod_base = OTHER; note = 2'-fluorouridine
  modified_base 9: mod_base = um
  modified_base 10: mod_base = OTHER; note = 2'-fluorouridine
  modified_base 11: mod_base = cm
  modified_base 12: mod_base = OTHER; note = 2'-fluorocytidine
  modified_base 13: mod_base = OTHER; note = 2'-O-methyladenosine
  modified_base 14: mod_base = OTHER; note = 2'-fluorocytidine
  modified_base 15: mod_base = um
  modified_base 16: mod_base = OTHER; note = 2'-fluoroadenosine
  modified_base 17: mod_base = cm
  modified_base 18: mod_base = OTHER; note = 2'-fluorouridine
  modified_base 19: mod_base = um
  modified_base 20: mod_base = OTHER; note = 2'-fluorocytidine
  modified_base 20^21: mod_base = OTHER; note = phosphorothioate linkage
  modified_base 21: mod_base = cm
  source 1..21: mol_type = other RNA
ttaggattttccactacttcc

SEQ ID NO: 679 - RNA, 21 nt, synthetic construct
  modified_base 1: mod_base = OTHER; note = 2'-O-methyladenosine
  modified_base 1^2: mod_base = OTHER; note = phosphorothioate linkage
  modified_base 2: mod_base = OTHER; note = 2'-fluoroadenosine
  modified_base 2^3: mod_base = OTHER; note = phosphorothioate linkage
  modified_base 3: mod_base = OTHER; note = 2'-O-methyladenosine
  modified_base 3^4: mod_base = OTHER; note = phosphorothioate linkage
  modified_base 4: mod_base = OTHER; note = 2'-fluorocytidine
  modified_base 5: mod_base = cm
  modified_base 6: mod_base = OTHER; note = 2'-fluoroadenosine
  modified_base 7: mod_base = OTHER; note = 2'-O-methyladenosine
  modified_base 8: mod_base = OTHER; note = 2'-fluorocytidine
  modified_base 9: mod_base = OTHER; note = 2'-O-methyladenosine
  modified_base 10: mod_base = OTHER; note = 2'-fluorocytidine
  modified_base 11: mod_base = um
  modified_base 12: mod_base = OTHER; note = 2'-fluoroadenosine
  modified_base 13: mod_base = cm
  modified_base 14: mod_base = OTHER; note = 2'-fluorocytidine
  modified_base 15: mod_base = OTHER; note = 2'-O-methyladenosine
  modified_base 16: mod_base = OTHER; note = 2'-fluorocytidine
  modified_base 17: mod_base = OTHER; note = 2'-O-methyladenosine
  modified_base 18: mod_base = OTHER; note = 2'-fluorouridine
  modified_base 19: mod_base = gm
  modified_base 20: mod_base = OTHER; note = 2'-fluoroadenosine
  modified_base 20^21: mod_base = OTHER; note = phosphorothioate linkage
  modified_base 21: mod_base = cm
  source 1..21: mol_type = other RNA
aaaccaacactaccacatgac

SEQ ID NO: 680 - RNA, 21 nt, synthetic construct
  modified_base 1: mod_base = OTHER; note = 2'-O-methyladenosine
  modified_base 1^2: mod_base = OTHER; note = phosphorothioate linkage
  modified_base 2: mod_base = OTHER; note = 2'-fluorouridine
  modified_base 2^3: mod_base = OTHER; note = phosphorothioate linkage
  modified_base 3: mod_base = OTHER; note = 2'-O-methyladenosine
  modified_base 3^4: mod_base = OTHER; note = phosphorothioate linkage
  modified_base 4: mod_base = OTHER; note = 2'-fluorocytidine
  modified_base 5: mod_base = OTHER; note = 2'-O-methyladenosine
  modified_base 6: mod_base = OTHER; note = 2'-fluorouridine
  modified_base 7: mod_base = um
  modified_base 8: mod_base = OTHER; note = 2'-fluorouridine
  modified_base 9: mod_base = gm
  modified_base 10: mod_base = OTHER; note = 2'-fluoroguanosine
  modified_base 11: mod_base = gm
  modified_base 12: mod_base = OTHER; note = 2'-fluorouridine
  modified_base 13: mod_base = cm
  modified_base 14: mod_base = OTHER; note = 2'-fluoroadenosine
  modified_base 15: mod_base = um
  modified_base 16: mod_base = OTHER; note = 2'-fluoroadenosine
  modified_base 17: mod_base = gm
  modified_base 18: mod_base = OTHER; note = 2'-fluorocytidine
  modified_base 19: mod_base = um
  modified_base 20: mod_base = OTHER; note = 2'-fluorouridine
  modified_base 20^21: mod_base = OTHER; note = phosphorothioate linkage
  modified_base 21: mod_base = gm
  source 1..21: mol_type = other RNA
atacatttgggtcatagcttg

SEQ ID NO: 681 - RNA, 21 nt, synthetic construct
  modified_base 1: mod_base = um
  modified_base 1^2: mod_base = OTHER; note = phosphorothioate linkage
  modified_base 2: mod_base = OTHER; note = 2'-fluoroguanosine
  modified_base 2^3: mod_base = OTHER; note = phosphorothioate linkage
  modified_base 3: mod_base = OTHER; note = 2'-O-methyladenosine
  modified_base 3^4: mod_base = OTHER; note = phosphorothioate linkage
  modified_base 4: mod_base = OTHER; note = 2'-fluorouridine
  modified_base 5: mod_base = OTHER; note = 2'-O-methyladenosine
  modified_base 6: mod_base = OTHER; note = 2'-fluorouridine
  modified_base 7: mod_base = OTHER; note = 2'-O-methyladenosine
  modified_base 8: mod_base = OTHER; note = 2'-fluorouridine
  modified_base 9: mod_base = gm
  modified_base 10: mod_base = OTHER; note = 2'-fluorouridine
  modified_base 11: mod_base = gm
  modified_base 12: mod_base = OTHER; note = 2'-fluoroguanosine
  modified_base 13: mod_base = um
  modified_base 14: mod_base = OTHER; note = 2'-fluoroadenosine
  modified_base 15: mod_base = cm
  modified_base 16: mod_base = OTHER; note = 2'-fluorocytidine
  modified_base 17: mod_base = OTHER; note = 2'-O-methyladenosine
  modified_base 18: mod_base = OTHER; note = 2'-fluorouridine
  modified_base 19: mod_base = gm
  modified_base 20: mod_base = OTHER; note = 2'-fluorouridine
  modified_base 20^21: mod_base = OTHER; note = phosphorothioate linkage
  modified_base 21: mod_base = cm
  source 1..21: mol_type = other RNA
tgatatatgtggtaccatgtc

SEQ ID NO: 682 - RNA, 21 nt, synthetic construct
  modified_base 1: mod_base = um
  modified_base 1^2: mod_base = OTHER; note = phosphorothioate linkage
  modified_base 2: mod_base = OTHER; note = 2'-fluorouridine
  modified_base 2^3: mod_base = OTHER; note = phosphorothioate linkage
  modified_base 3: mod_base = gm
  modified_base 3^4: mod_base = OTHER; note = phosphorothioate linkage
  modified_base 4: mod_base = OTHER; note = 2'-fluoroadenosine
  modified_base 5: mod_base = um
  modified_base 6: mod_base = OTHER; note = 2'-fluoroadenosine
  modified_base 7: mod_base = um
  modified_base 8: mod_base = OTHER; note = 2'-fluoroadenosine
  modified_base 9: mod_base = um
  modified_base 10: mod_base = OTHER; note = 2'-fluoroguanosine
  modified_base 11: mod_base = um
  modified_base 12: mod_base = OTHER; note = 2'-fluoroguanosine
  modified_base 13: mod_base = gm
  modified_base 14: mod_base = OTHER; note = 2'-fluorouridine
  modified_base 15: mod_base = OTHER; note = 2'-O-methyladenosine
  modified_base 16: mod_base = OTHER; note = 2'-fluorocytidine
  modified_base 17: mod_base = cm
  modified_base 18: mod_base = OTHER; note = 2'-fluoroadenosine
  modified_base 19: mod_base = um
  modified_base 20: mod_base = OTHER; note = 2'-fluoroguanosine
  modified_base 20^21: mod_base = OTHER; note = phosphorothioate linkage
  modified_base 21: mod_base = cm
  source 1..21: mol_type = other RNA
ttgatatatgtggtaccatgc

SEQ ID NO: 683 - RNA, 21 nt, synthetic construct
  modified_base 1: mod_base = um
  modified_base 1^2: mod_base = OTHER; note = phosphorothioate linkage
  modified_base 2: mod_base = OTHER; note = 2'-fluorouridine
  modified_base 2^3: mod_base = OTHER; note = phosphorothioate linkage
  modified_base 3: mod_base = um
  modified_base 3^4: mod_base = OTHER; note = phosphorothioate linkage
  modified_base 4: mod_base = OTHER; note = 2'-fluoroadenosine
  modified_base 5: mod_base = cm
  modified_base 6: mod_base = OTHER; note = 2'-fluoroadenosine
  modified_base 7: mod_base = um
  modified_base 8: mod_base = OTHER; note = 2'-fluorocytidine
  modified_base 9: mod_base = cm
  modified_base 10: mod_base = OTHER; note = 2'-fluorouridine
  modified_base 11: mod_base = gm
  modified_base 12: mod_base = OTHER; note = 2'-fluoroadenosine
  modified_base 13: mod_base = um
  modified_base 14: mod_base = OTHER; note = 2'-fluorouridine
  modified_base 15: mod_base = OTHER; note = 2'-O-methyladenosine
  modified_base 16: mod_base = OTHER; note = 2'-fluorouridine
  modified_base 17: mod_base = gm
  modified_base 18: mod_base = OTHER; note = 2'-fluorouridine
  modified_base 19: mod_base = OTHER; note = 2'-O-methyladenosine
  modified_base 20: mod_base = OTHER; note = 2'-fluorocytidine
  modified_base 20^21: mod_base = OTHER; note = phosphorothioate linkage
  modified_base 21: mod_base = cm
  source 1..21: mol_type = other RNA
tttacatcctgattatgtacc

SEQ ID NO: 684 - RNA, 21 nt, synthetic construct
  modified_base 1: mod_base = OTHER; note = 2'-O-methyladenosine
  modified_base 1^2: mod_base = OTHER; note = phosphorothioate linkage
  modified_base 2: mod_base = OTHER; note = 2'-fluoroadenosine
  modified_base 2^3: mod_base = OTHER; note = phosphorothioate linkage
  modified_base 3: mod_base = gm
  modified_base 3^4: mod_base = OTHER; note = phosphorothioate linkage
  modified_base 4: mod_base = OTHER; note = 2'-fluorouridine
  modified_base 5: mod_base = um
  modified_base 6: mod_base = OTHER; note = 2'-fluorouridine
  modified_base 7: mod_base = OTHER; note = 2'-O-methyladenosine
  modified_base 8: mod_base = OTHER; note = 2'-fluorocytidine
  modified_base 9: mod_base = OTHER; note = 2'-O-methyladenosine
  modified_base 10: mod_base = OTHER; note = 2'-fluorouridine
  modified_base 11: mod_base = cm
  modified_base 12: mod_base = OTHER; note = 2'-fluorocytidine
  modified_base 13: mod_base = um
  modified_base 14: mod_base = OTHER; note = 2'-fluoroguanosine
  modified_base 15: mod_base = OTHER; note = 2'-O-methyladenosine
  modified_base 16: mod_base = OTHER; note = 2'-fluorouridine
  modified_base 17: mod_base = um
  modified_base 18: mod_base = OTHER; note = 2'-fluoroadenosine
  modified_base 19: mod_base = um
  modified_base 20: mod_base = OTHER; note = 2'-fluoroguanosine
  modified_base 20^21: mod_base = OTHER; note = phosphorothioate linkage
  modified_base 21: mod_base = cm
  source 1..21: mol_type = other RNA
aagtttacatcctgattatgc

SEQ ID NO: 685 - RNA, 21 nt, synthetic construct
  modified_base 1: mod_base = um
  modified_base 1^2: mod_base = OTHER; note = phosphorothioate linkage
  modified_base 2: mod_base = OTHER; note = 2'-fluoroadenosine
  modified_base 2^3: mod_base = OTHER; note = phosphorothioate linkage
  modified_base 3: mod_base = OTHER; note = 2'-O-methyladenosine
  modified_base 3^4: mod_base = OTHER; note = phosphorothioate linkage
  modified_base 4: mod_base = OTHER; note = 2'-fluoroguanosine
  modified_base 5: mod_base = um
  modified_base 6: mod_base = OTHER; note = 2'-fluorouridine
  modified_base 7: mod_base = um
  modified_base 8: mod_base = OTHER; note = 2'-fluoroadenosine
  modified_base 9: mod_base = cm
  modified_base 10: mod_base = OTHER; note = 2'-fluoroadenosine
  modified_base 11: mod_base = um
  modified_base 12: mod_base = OTHER; note = 2'-fluorocytidine
  modified_base 13: mod_base = cm
  modified_base 14: mod_base = OTHER; note = 2'-fluorouridine
  modified_base 15: mod_base = gm
  modified_base 16: mod_base = OTHER; note = 2'-fluoroadenosine
  modified_base 17: mod_base = um
  modified_base 18: mod_base = OTHER; note = 2'-fluorouridine
  modified_base 19: mod_base = OTHER; note = 2'-O-methyladenosine
  modified_base 20: mod_base = OTHER; note = 2'-fluorouridine
  modified_base 20^21: mod_base = OTHER; note = phosphorothioate linkage
  modified_base 21: mod_base = gm
  source 1..21: mol_type = other RNA
taagtttacatcctgattatg

SEQ ID NO: 686 - RNA, 21 nt, synthetic construct
  modified_base 1: mod_base = um
  modified_base 1^2: mod_base = OTHER; note = phosphorothioate linkage
  modified_base 2: mod_base = OTHER; note = 2'-fluoroadenosine
  modified_base 2^3: mod_base = OTHER; note = phosphorothioate linkage
  modified_base 3: mod_base = gm
  modified_base 3^4: mod_base = OTHER; note = phosphorothioate linkage
  modified_base 4: mod_base = OTHER; note = 2'-fluorocytidine
  modified_base 5: mod_base = um
  modified_base 6: mod_base = OTHER; note = 2'-fluoroadenosine
  modified_base 7: mod_base = um
  modified_base 8: mod_base = OTHER; note = 2'-fluoroguanosine
  modified_base 9: mod_base = um
  modified_base 10: mod_base = OTHER; note = 2'-fluoroadenosine
  modified_base 11: mod_base = OTHER; note = 2'-O-methyladenosine
  modified_base 12: mod_base = OTHER; note = 2'-fluoroguanosine
  modified_base 13: mod_base = um
  modified_base 14: mod_base = OTHER; note = 2'-fluorouridine
  modified_base 15: mod_base = um
  modified_base 16: mod_base = OTHER; note = 2'-fluoroadenosine
  modified_base 17: mod_base = cm
  modified_base 18: mod_base = OTHER; note = 2'-fluoroadenosine
  modified_base 19: mod_base = um
  modified_base 20: mod_base = OTHER; note = 2'-fluorocytidine
  modified_base 20^21: mod_base = OTHER; note = phosphorothioate linkage
  modified_base 21: mod_base = cm
  source 1..21: mol_type = other RNA
tagctatgtaagtttacatcc

SEQ ID NO: 687 - RNA, 21 nt, synthetic construct
  modified_base 1: mod_base = OTHER; note = 2'-O-methyladenosine
  modified_base 1^2: mod_base = OTHER; note = phosphorothioate linkage
  modified_base 2: mod_base = OTHER; note = 2'-fluorouridine
  modified_base 2^3: mod_base = OTHER; note = phosphorothioate linkage
  modified_base 3: mod_base = OTHER; note = 2'-O-methyladenosine
  modified_base 3^4: mod_base = OTHER; note = phosphorothioate linkage
  modified_base 4: mod_base = OTHER; note = 2'-fluoroadenosine
  modified_base 5: mod_base = um
  modified_base 6: mod_base = OTHER; note = 2'-fluoroadenosine
  modified_base 7: mod_base = OTHER; note = 2'-O-methyladenosine
  modified_base 8: mod_base = OTHER; note = 2'-fluoroadenosine
  modified_base 9: mod_base = gm
  modified_base 10: mod_base = OTHER; note = 2'-fluorouridine
  modified_base 11: mod_base = cm
  modified_base 12: mod_base = OTHER; note = 2'-fluorouridine
  modified_base 13: mod_base = OTHER; note = 2'-O-methyladenosine
  modified_base 14: mod_base = OTHER; note = 2'-fluoroguanosine
  modified_base 15: mod_base = cm
  modified_base 16: mod_base = OTHER; note = 2'-fluorocytidine
  modified_base 17: mod_base = um
  modified_base 18: mod_base = OTHER; note = 2'-fluorouridine
  modified_base 19: mod_base = OTHER; note = 2'-O-methyladenosine
  modified_base 20: mod_base = OTHER; note = 2'-fluorocytidine
  modified_base 20^21: mod_base = OTHER; note = phosphorothioate linkage
  modified_base 21: mod_base = cm
  source 1..21: mol_type = other RNA
ataataaagtctagccttacc

SEQ ID NO: 688 - RNA, 21 nt, synthetic construct
  modified_base 1: mod_base = um
  modified_base 1^2: mod_base = OTHER; note = phosphorothioate linkage
  modified_base 2: mod_base = OTHER; note = 2'-fluorouridine
  modified_base 2^3: mod_base = OTHER; note = phosphorothioate linkage
  modified_base 3: mod_base = OTHER; note = 2'-O-methyladenosine
  modified_base 3^4: mod_base = OTHER; note = phosphorothioate linkage
  modified_base 4: mod_base = OTHER; note = 2'-fluorocytidine
  modified_base 5: mod_base = um
  modified_base 6: mod_base = OTHER; note = 2'-fluoroadenosine
  modified_base 7: mod_base = cm
  modified_base 8: mod_base = OTHER; note = 2'-fluoroadenosine
  modified_base 9: mod_base = gm
  modified_base 10: mod_base = OTHER; note = 2'-fluoroadenosine
  modified_base 11: mod_base = um
  modified_base 12: mod_base = OTHER; note = 2'-fluoroadenosine
  modified_base 13: mod_base = gm
  modified_base 14: mod_base = OTHER; note = 2'-fluoroadenosine
  modified_base 15: mod_base = gm
  modified_base 16: mod_base = OTHER; note = 2'-fluoroadenosine
  modified_base 17: mod_base = cm
  modified_base 18: mod_base = OTHER; note = 2'-fluoroadenosine
  modified_base 19: mod_base = cm
  modified_base 20: mod_base = OTHER; note = 2'-fluorocytidine
  modified_base 20^21: mod_base = OTHER; note = phosphorothioate linkage
  modified_base 21: mod_base = OTHER; note = 2'-O-methyladenosine
  source 1..21: mol_type = other RNA
ttactacagatagagacacca

SEQ ID NO: 689 - RNA, 21 nt, synthetic construct
  modified_base 1: mod_base = um
  modified_base 1^2: mod_base = OTHER; note = phosphorothioate linkage
  modified_base 2: mod_base = OTHER; note = 2'-fluoroadenosine
  modified_base 2^3: mod_base = OTHER; note = phosphorothioate linkage
  modified_base 3: mod_base = um
  modified_base 3^4: mod_base = OTHER; note = phosphorothioate linkage
  modified_base 4: mod_base = OTHER; note = 2'-fluoroadenosine
  modified_base 5: mod_base = gm
  modified_base 6: mod_base = OTHER; note = 2'-fluorouridine
  modified_base 7: mod_base = OTHER; note = 2'-O-methyladenosine
  modified_base 8: mod_base = OTHER; note = 2'-fluorocytidine
  modified_base 9: mod_base = um
  modified_base 10: mod_base = OTHER; note = 2'-fluoroadenosine
  modified_base 11: mod_base = cm
  modified_base 12: mod_base = OTHER; note = 2'-fluoroadenosine
  modified_base 13: mod_base = gm
  modified_base 14: mod_base = OTHER; note = 2'-fluoroadenosine
  modified_base 15: mod_base = um
  modified_base 16: mod_base = OTHER; note = 2'-fluoroadenosine
  modified_base 17: mod_base = gm
  modified_base 18: mod_base = OTHER; note = 2'-fluoroadenosine
  modified_base 19: mod_base = gm
  modified_base 20: mod_base = OTHER; note = 2'-fluoroadenosine
  modified_base 20^21: mod_base = OTHER; note = phosphorothioate linkage
  modified_base 21: mod_base = cm
  source 1..21: mol_type = other RNA
tatagtactacagatagagac

SEQ ID NO: 690 - RNA, 21 nt, synthetic construct
  modified_base 1: mod_base = um
  modified_base 1^2: mod_base = OTHER; note = phosphorothioate linkage
  modified_base 2: mod_base = OTHER; note = 2'-fluorocytidine
  modified_base 2^3: mod_base = OTHER; note = phosphorothioate linkage
  modified_base 3: mod_base = OTHER; note = 2'-O-methyladenosine
  modified_base 3^4: mod_base = OTHER; note = phosphorothioate linkage
  modified_base 4: mod_base = OTHER; note = 2'-fluorouridine
  modified_base 5: mod_base = OTHER; note = 2'-O-methyladenosine
  modified_base 6: mod_base = OTHER; note = 2'-fluoroguanosine
  modified_base 7: mod_base = um
  modified_base 8: mod_base = OTHER; note = 2'-fluoroadenosine
  modified_base 9: mod_base = cm
  modified_base 10: mod_base = OTHER; note = 2'-fluorouridine
  modified_base 11: mod_base = OTHER; note = 2'-O-methyladenosine
  modified_base 12: mod_base = OTHER; note = 2'-fluorocytidine
  modified_base 13: mod_base = OTHER; note = 2'-O-methyladenosine
  modified_base 14: mod_base = OTHER; note = 2'-fluoroguanosine
  modified_base 15: mod_base = OTHER; note = 2'-O-methyladenosine
  modified_base 16: mod_base = OTHER; note = 2'-fluorouridine
  modified_base 17: mod_base = OTHER; note = 2'-O-methyladenosine
  modified_base 18: mod_base = OTHER; note = 2'-fluoroguanosine
  modified_base 19: mod_base = OTHER; note = 2'-O-methyladenosine
  modified_base 20: mod_base = OTHER; note = 2'-fluoroguanosine
  modified_base 20^21: mod_base = OTHER; note = phosphorothioate linkage
  modified_base 21: mod_base = cm
  source 1..21: mol_type = other RNA
tcatagtactacagatagagc

SEQ ID NO: 691 - RNA, 21 nt, synthetic construct
  modified_base 1: mod_base = um
  modified_base 1^2: mod_base = OTHER; note = phosphorothioate linkage
  modified_base 2: mod_base = OTHER; note = 2'-fluoroguanosine
  modified_base 2^3: mod_base = OTHER; note = phosphorothioate linkage
  modified_base 3: mod_base = um
  modified_base 3^4: mod_base = OTHER; note = phosphorothioate linkage
  modified_base 4: mod_base = OTHER; note = 2'-fluorocytidine
  modified_base 5: mod_base = OTHER; note = 2'-O-methyladenosine
  modified_base 6: mod_base = OTHER; note = 2'-fluorouridine
  modified_base 7: mod_base = OTHER; note = 2'-O-methyladenosine
  modified_base 8: mod_base = OTHER; note = 2'-fluoroguanosine
  modified_base 9: mod_base = um
  modified_base 10: mod_base = OTHER; note = 2'-fluoroadenosine
  modified_base 11: mod_base = cm
  modified_base 12: mod_base = OTHER; note = 2'-fluorouridine
  modified_base 13: mod_base = OTHER; note = 2'-O-methyladenosine
  modified_base 14: mod_base = OTHER; note = 2'-fluorocytidine
  modified_base 15: mod_base = OTHER; note = 2'-O-methyladenosine
  modified_base 16: mod_base = OTHER; note = 2'-fluoroguanosine
  modified_base 17: mod_base = OTHER; note = 2'-O-methyladenosine
  modified_base 18: mod_base = OTHER; note = 2'-fluorouridine
  modified_base 19: mod_base = OTHER; note = 2'-O-methyladenosine
  modified_base 20: mod_base = OTHER; note = 2'-fluoroguanosine
  modified_base 20^21: mod_base = OTHER; note = phosphorothioate linkage
  modified_base 21: mod_base = cm
  source 1..21: mol_type = other RNA
tgtcatagtactacagatagc

SEQ ID NO: 692 - RNA, 21 nt, synthetic construct
  modified_base 1: mod_base = um
  modified_base 1^2: mod_base = OTHER; note = phosphorothioate linkage
  modified_base 2: mod_base = OTHER; note = 2'-fluoroadenosine
  modified_base 2^3: mod_base = OTHER; note = phosphorothioate linkage
  modified_base 3: mod_base = OTHER; note = 2'-O-methyladenosine
  modified_base 3^4: mod_base = OTHER; note = phosphorothioate linkage
  modified_base 4: mod_base = OTHER; note = 2'-fluorouridine
  modified_base 5: mod_base = um
  modified_base 6: mod_base = OTHER; note = 2'-fluorouridine
  modified_base 7: mod_base = gm
  modified_base 8: mod_base = OTHER; note = 2'-fluorocytidine
  modified_base 9: mod_base = OTHER; note = 2'-O-methyladenosine
  modified_base 10: mod_base = OTHER; note = 2'-fluoroadenosine
  modified_base 11: mod_base = cm
  modified_base 12: mod_base = OTHER; note = 2'-fluoroadenosine
  modified_base 13: mod_base = um
  modified_base 14: mod_base = OTHER; note = 2'-fluorouridine
  modified_base 15: mod_base = gm
  modified_base 16: mod_base = OTHER; note = 2'-fluorocytidine
  modified_base 17: mod_base = um
  modified_base 18: mod_base = OTHER; note = 2'-fluoroadenosine
  modified_base 19: mod_base = gm
  modified_base 20: mod_base = OTHER; note = 2'-fluoroadenosine
  modified_base 20^21: mod_base = OTHER; note = phosphorothioate linkage
  modified_base 21: mod_base = cm
  source 1..21: mol_type = other RNA
taatttgcaacattgctagac

SEQ ID NO: 693 - RNA, 21 nt, synthetic construct
  modified_base 1: mod_base = um
  modified_base 1^2: mod_base = OTHER; note = phosphorothioate linkage
  modified_base 2: mod_base = OTHER; note = 2'-fluorocytidine
  modified_base 2^3: mod_base = OTHER; note = phosphorothioate linkage
  modified_base 3: mod_base = OTHER; note = 2'-O-methyladenosine
  modified_base 3^4: mod_base = OTHER; note = phosphorothioate linkage
  modified_base 4: mod_base = OTHER; note = 2'-fluorouridine
  modified_base 5: mod_base = cm
  modified_base 6: mod_base = OTHER; note = 2'-fluoroadenosine
  modified_base 7: mod_base = um
  modified_base 8: mod_base = OTHER; note = 2'-fluoroadenosine
  modified_base 9: mod_base = gm
  modified_base 10: mod_base = OTHER; note = 2'-fluoroadenosine
  modified_base 11: mod_base = gm
  modified_base 12: mod_base = OTHER; note = 2'-fluoroadenosine
  modified_base 13: mod_base = um
  modified_base 14: mod_base = OTHER; note = 2'-fluoroguanosine
  modified_base 15: mod_base = OTHER; note = 2'-O-methyladenosine
  modified_base 16: mod_base = OTHER; note = 2'-fluoroguanosine
  modified_base 17: mod_base = um
  modified_base 18: mod_base = OTHER; note = 2'-fluorocytidine
  modified_base 19: mod_base = um
  modified_base 20: mod_base = OTHER; note = 2'-fluorouridine
  modified_base 20^21: mod_base = OTHER; note = phosphorothioate linkage
  modified_base 21: mod_base = cm
  source 1..21: mol_type = other RNA
tcatcatagagatgagtcttc

SEQ ID NO: 694 - RNA, 21 nt, synthetic construct
  modified_base 1: mod_base = um
  modified_base 1^2: mod_base = OTHER; note = phosphorothioate linkage
  modified_base 2: mod_base = OTHER; note = 2'-fluorouridine
  modified_base 2^3: mod_base = OTHER; note = phosphorothioate linkage
  modified_base 3: mod_base = cm
  modified_base 3^4: mod_base = OTHER; note = phosphorothioate linkage
  modified_base 4: mod_base = OTHER; note = 2'-fluorocytidine
  modified_base 5: mod_base = OTHER; note = 2'-O-methyladenosine
  modified_base 6: mod_base = OTHER; note = 2'-fluoroadenosine
  modified_base 7: mod_base = um
  modified_base 8: mod_base = OTHER; note = 2'-fluorouridine
  modified_base 9: mod_base = OTHER; note = 2'-O-methyladenosine
  modified_base 10: mod_base = OTHER; note = 2'-fluoroadenosine
  modified_base 11: mod_base = um
  modified_base 12: mod_base = OTHER; note = 2'-fluoroguanosine
  modified_base 13: mod_base = um
  modified_base 14: mod_base = OTHER; note = 2'-fluoroguanosine
  modified_base 15: mod_base = OTHER; note = 2'-O-methyladenosine
  modified_base 16: mod_base = OTHER; note = 2'-fluorocytidine
  modified_base 17: mod_base = um
  modified_base 18: mod_base = OTHER; note = 2'-fluorocytidine
  modified_base 19: mod_base = cm
  modified_base 20: mod_base = OTHER; note = 2'-fluoroadenosine
  modified_base 20^21: mod_base = OTHER; note = phosphorothioate linkage
  modified_base 21: mod_base = cm
  source 1..21: mol_type = other RNA
ttccaattaatgtgactccac

SEQ ID NO: 695 - RNA, 21 nt, synthetic construct
  modified_base 1: mod_base = um
  modified_base 1^2: mod_base = OTHER; note = phosphorothioate linkage
  modified_base 2: mod_base = OTHER; note = 2'-fluoroadenosine
  modified_base 2^3: mod_base = OTHER; note = phosphorothioate linkage
  modified_base 3: mod_base = cm
  modified_base 3^4: mod_base = OTHER; note = phosphorothioate linkage
  modified_base 4: mod_base = OTHER; note = 2'-fluoroadenosine
  modified_base 5: mod_base = um
  modified_base 6: mod_base = OTHER; note = 2'-fluoroadenosine
  modified_base 7: mod_base = OTHER; note = 2'-O-methyladenosine
  modified_base 8: mod_base = OTHER; note = 2'-fluoroguanosine
  modified_base 9: mod_base = um
  modified_base 10: mod_base = OTHER; note = 2'-fluorouridine
  modified_base 11: mod_base = cm
  modified_base 12: mod_base = OTHER; note = 2'-fluoroguanosine
  modified_base 13: mod_base = um
  modified_base 14: mod_base = OTHER; note = 2'-fluoroadenosine
  modified_base 15: mod_base = cm
  modified_base 16: mod_base = OTHER; note = 2'-fluorouridine
  modified_base 17: mod_base = cm
  modified_base 18: mod_base = OTHER; note = 2'-fluoroadenosine
  modified_base 19: mod_base = um
  modified_base 20: mod_base = OTHER; note = 2'-fluorocytidine
  modified_base 20^21: mod_base = OTHER; note = phosphorothioate linkage
  modified_base 21: mod_base = cm
  source 1..21: mol_type = other RNA
tacataagttcgtactcatcc

SEQ ID NO: 696 - RNA, 21 nt, synthetic construct
  modified_base 1: mod_base = um
  modified_base 1^2: mod_base = OTHER; note = phosphorothioate linkage
  modified_base 2: mod_base = OTHER; note = 2'-fluoroguanosine
  modified_base 2^3: mod_base = OTHER; note = phosphorothioate linkage
  modified_base 3: mod_base = OTHER; note = 2'-O-methyladenosine
  modified_base 3^4: mod_base = OTHER; note = phosphorothioate linkage
  modified_base 4: mod_base = OTHER; note = 2'-fluoroadenosine
  modified_base 5: mod_base = um
  modified_base 6: mod_base = OTHER; note = 2'-fluoroguanosine
  modified_base 7: mod_base = OTHER; note = 2'-O-methyladenosine
  modified_base 8: mod_base = OTHER; note = 2'-fluoroguanosine
  modified_base 9: mod_base = um
  modified_base 10: mod_base = OTHER; note = 2'-fluoroadenosine
  modified_base 11: mod_base = cm
  modified_base 12: mod_base = OTHER; note = 2'-fluoroadenosine
  modified_base 13: mod_base = um
  modified_base 14: mod_base = OTHER; note = 2'-fluoroadenosine
  modified_base 15: mod_base = OTHER; note = 2'-O-methyladenosine
  modified_base 16: mod_base = OTHER; note = 2'-fluoroguanosine
  modified_base 17: mod_base = um
  modified_base 18: mod_base = OTHER; note = 2'-fluorouridine
  modified_base 19: mod_base = cm
  modified_base 20: mod_base = OTHER; note = 2'-fluoroguanosine
  modified_base 20^21: mod_base = OTHER; note = phosphorothioate linkage
  modified_base 21: mod_base = um
  source 1..21: mol_type = other RNA
tgaatgagtacataagttcgt

SEQ ID NO: 697 - RNA, 21 nt, synthetic construct
  modified_base 1: mod_base = OTHER; note = 2'-O-methyladenosine
  modified_base 1^2: mod_base = OTHER; note = phosphorothioate linkage
  modified_base 2: mod_base = OTHER; note = 2'-fluorocytidine
  modified_base 2^3: mod_base = OTHER; note = phosphorothioate linkage
  modified_base 3: mod_base = gm
  modified_base 3^4: mod_base = OTHER; note = phosphorothioate linkage
  modified_base 4: mod_base = OTHER; note = 2'-fluoroadenosine
  modified_base 5: mod_base = OTHER; note = 2'-O-methyladenosine
  modified_base 6: mod_base = OTHER; note = 2'-fluorouridine
  modified_base 7: mod_base = gm
  modified_base 8: mod_base = OTHER; note = 2'-fluoroadenosine
  modified_base 9: mod_base = gm
  modified_base 10: mod_base = OTHER; note = 2'-fluorouridine
  modified_base 11: mod_base = OTHER; note = 2'-O-methyladenosine
  modified_base 12: mod_base = OTHER; note = 2'-fluorocytidine
  modified_base 13: mod_base = OTHER; note = 2'-O-methyladenosine
  modified_base 14: mod_base = OTHER; note = 2'-fluorouridine
  modified_base 15: mod_base = OTHER; note = 2'-O-methyladenosine
  modified_base 16: mod_base = OTHER; note = 2'-fluoroadenosine
  modified_base 17: mod_base = gm
  modified_base 18: mod_base = OTHER; note = 2'-fluorouridine
  modified_base 19: mod_base = um
  modified_base 20: mod_base = OTHER; note = 2'-fluorocytidine
  modified_base 20^21: mod_base = OTHER; note = phosphorothioate linkage
  modified_base 21: mod_base = gm
  source 1..21: mol_type = other RNA
acgaatgagtacataagttcg

SEQ ID NO: 698 - RNA, 21 nt, synthetic construct
  modified_base 1: mod_base = um
  modified_base 1^2: mod_base = OTHER; note = phosphorothioate linkage
  modified_base 2: mod_base = OTHER; note = 2'-fluoroguanosine
  modified_base 2^3: mod_base = OTHER; note = phosphorothioate linkage
  modified_base 3: mod_base = OTHER; note = 2'-O-methyladenosine
  modified_base 3^4: mod_base = OTHER; note = phosphorothioate linkage
  modified_base 4: mod_base = OTHER; note = 2'-fluoroadenosine
  modified_base 5: mod_base = OTHER; note = 2'-O-methyladenosine
  modified_base 6: mod_base = OTHER; note = 2'-fluorocytidine
  modified_base 7: mod_base = gm
  modified_base 8: mod_base = OTHER; note = 2'-fluoroadenosine
  modified_base 9: mod_base = OTHER; note = 2'-O-methyladenosine
  modified_base 10: mod_base = OTHER; note = 2'-fluorouridine
  modified_base 11: mod_base = gm
  modified_base 12: mod_base = OTHER; note = 2'-fluoroadenosine
  modified_base 13: mod_base = gm
  modified_base 14: mod_base = OTHER; note = 2'-fluorouridine
  modified_base 15: mod_base = OTHER; note = 2'-O-methyladenosine
  modified_base 16: mod_base = OTHER; note = 2'-fluorocytidine
  modified_base 17: mod_base = OTHER; note = 2'-O-methyladenosine
  modified_base 18: mod_base = OTHER; note = 2'-fluorouridine
  modified_base 19: mod_base = OTHER; note = 2'-O-methyladenosine
  modified_base 20: mod_base = OTHER; note = 2'-fluoroadenosine
  modified_base 20^21: mod_base = OTHER; note = phosphorothioate linkage
  modified_base 21: mod_base = gm
  source 1..21: mol_type = other RNA
tgaaacgaatgagtacataag

SEQ ID NO: 699 - RNA, 21 nt, synthetic construct
  modified_base 1: mod_base = OTHER; note = 2'-O-methyladenosine
  modified_base 1^2: mod_base = OTHER; note = phosphorothioate linkage
  modified_base 2: mod_base = OTHER; note = 2'-fluoroadenosine
  modified_base 2^3: mod_base = OTHER; note = phosphorothioate linkage
  modified_base 3: mod_base = gm
  modified_base 3^4: mod_base = OTHER; note = phosphorothioate linkage
  modified_base 4: mod_base = OTHER; note = 2'-fluoroadenosine
  modified_base 5: mod_base = OTHER; note = 2'-O-methyladenosine
  modified_base 6: mod_base = OTHER; note = 2'-fluoroguanosine
  modified_base 7: mod_base = um
  modified_base 8: mod_base = OTHER; note = 2'-fluoroadenosine
  modified_base 9: mod_base = cm
  modified_base 10: mod_base = OTHER; note = 2'-fluoroguanosine
  modified_base 11: mod_base = cm
  modified_base 12: mod_base = OTHER; note = 2'-fluorouridine
  modified_base 13: mod_base = OTHER; note = 2'-O-methyladenosine
  modified_base 14: mod_base = OTHER; note = 2'-fluorouridine
  modified_base 15: mod_base = um
  modified_base 16: mod_base = OTHER; note = 2'-fluoroadenosine
  modified_base 17: mod_base = OTHER; note = 2'-O-methyladenosine
  modified_base 18: mod_base = OTHER; note = 2'-fluorocytidine
  modified_base 19: mod_base = um
  modified_base 20: mod_base = OTHER; note = 2'-fluoroadenosine
  modified_base 20^21: mod_base = OTHER; note = phosphorothioate linkage
  modified_base 21: mod_base = cm
  source 1..21: mol_type = other RNA
aagaagtacgctattaactac

SEQ ID NO: 700 - DNA, 21 bp, synthetic construct
  modified_base 1: mod_base = OTHER; note = 2'-O-methyladenosine
  modified_base 1^2: mod_base = OTHER; note = phosphorothioate linkage
  modified_base 2: mod_base = OTHER; note = 2'-fluoroadenosine
  modified_base 2^3: mod_base = OTHER; note = phosphorothioate linkage
  modified_base 3: mod_base = gm
  modified_base 3^4: mod_base = OTHER; note = phosphorothioate linkage
  modified_base 4: mod_base = OTHER; note = 2'-fluoroadenosine
  modified_base 5: mod_base = OTHER; note = 2'-O-methyladenosine
  modified_base 6: mod_base = OTHER; note = 2'-fluorouridine
  modified_base 7: mod_base = OTHER; note = 2'-O-methyladenosine
  modified_base 8: mod_base = OTHER; note = 2'-fluorocytidine
  modified_base 9: mod_base = cm
  modified_base 10: mod_base = OTHER; note = 2'-fluoroadenosine
  modified_base 11: mod_base = cm
  modified_base 12: mod_base = OTHER; note = 2'-fluoroguanosine
  modified_base 13: mod_base = OTHER; note = 2'-O-methyladenosine
  modified_base 14: mod_base = OTHER; note = 2'-fluoroadenosine
  modified_base 15: mod_base = OTHER; note = 2'-O-methyladenosine
  modified_base 16: mod_base = OTHER; note = 2'-fluoroguanosine
  modified_base 17: mod_base = cm
  modified_base 18: mod_base = OTHER; note = 2'-fluoroadenosine
  modified_base 19: mod_base = OTHER; note = 2'-O-methyladenosine
  modified_base 20: mod_base = OTHER; note = 2'-fluoroguanosine
  modified_base 20^21: mod_base = OTHER; note = phosphorothioate linkage
  modified_base 21: mod_base = cm
  source 1..21: mol_type = other DNA
aagaataccacgaaagcaagc

SEQ ID NO: 701 - RNA, 21 nt, synthetic construct
  modified_base 1: mod_base = um
  modified_base 1^2: mod_base = OTHER; note = phosphorothioate linkage
  modified_base 2: mod_base = OTHER; note = 2'-fluoroadenosine
  modified_base 2^3: mod_base = OTHER; note = phosphorothioate linkage
  modified_base 3: mod_base = gm
  modified_base 3^4: mod_base = OTHER; note = phosphorothioate linkage
  modified_base 4: mod_base = OTHER; note = 2'-fluorouridine
  modified_base 5: mod_base = OTHER; note = 2'-O-methyladenosine
  modified_base 6: mod_base = OTHER; note = 2'-fluoroadenosine
  modified_base 7: mod_base = gm
  modified_base 8: mod_base = OTHER; note = 2'-fluoroguanosine
  modified_base 9: mod_base = OTHER; note = 2'-O-methyladenosine
  modified_base 10: mod_base = OTHER; note = 2'-fluorouridine
  modified_base 11: mod_base = gm
  modified_base 12: mod_base = OTHER; note = 2'-fluoroguanosine
  modified_base 13: mod_base = cm
  modified_base 14: mod_base = OTHER; note = 2'-fluorouridine
  modified_base 15: mod_base = OTHER; note = 2'-O-methyladenosine
  modified_base 16: mod_base = OTHER; note = 2'-fluoroguanosine
  modified_base 17: mod_base = um
  modified_base 18: mod_base = OTHER; note = 2'-fluoroguanosine
  modified_base 19: mod_base = um
  modified_base 20: mod_base = OTHER; note = 2'-fluoroadenosine
  modified_base 20^21: mod_base = OTHER; note = phosphorothioate linkage
  modified_base 21: mod_base = cm
  source 1..21: mol_type = other RNA
tagtaaggatggctagtgtac

SEQ ID NO: 702 - RNA, 21 nt, synthetic construct
  modified_base 1: mod_base = um
  modified_base 1^2: mod_base = OTHER; note = phosphorothioate linkage
  modified_base 2: mod_base = OTHER; note = 2'-fluorouridine
  modified_base 2^3: mod_base = OTHER; note = phosphorothioate linkage
  modified_base 3: mod_base = OTHER; note = 2'-O-methyladenosine
  modified_base 3^4: mod_base = OTHER; note = phosphorothioate linkage
  modified_base 4: mod_base = OTHER; note = 2'-fluoroadenosine
  modified_base 5: mod_base = cm
  modified_base 6: mod_base = OTHER; note = 2'-fluoroadenosine
  modified_base 7: mod_base = OTHER; note = 2'-O-methyladenosine
  modified_base 8: mod_base = OTHER; note = 2'-fluorouridine
  modified_base 9: mod_base = OTHER; note = 2'-O-methyladenosine
  modified_base 10: mod_base = OTHER; note = 2'-fluorouridine
  modified_base 11: mod_base = um
  modified_base 12: mod_base = OTHER; note = 2'-fluoroguanosine
  modified_base 13: mod_base = cm
  modified_base 14: mod_base = OTHER; note = 2'-fluoroadenosine
  modified_base 15: mod_base = gm
  modified_base 16: mod_base = OTHER; note = 2'-fluorocytidine
  modified_base 17: mod_base = OTHER; note = 2'-O-methyladenosine
  modified_base 18: mod_base = OTHER; note = 2'-fluoroguanosine
  modified_base 19: mod_base = um
  modified_base 20: mod_base = OTHER; note = 2'-fluoroadenosine
  modified_base 20^21: mod_base = OTHER; note = phosphorothioate linkage
  modified_base 21: mod_base = cm
  source 1..21: mol_type = other RNA
ttaacaatattgcagcagtac

SEQ ID NO: 703 - RNA, 21 nt, synthetic construct
  modified_base 1: mod_base = OTHER; note = 2'-O-methyladenosine
  modified_base 1^2: mod_base = OTHER; note = phosphorothioate linkage
  modified_base 2: mod_base = OTHER; note = 2'-fluorocytidine
  modified_base 2^3: mod_base = OTHER; note = phosphorothioate linkage
  modified_base 3: mod_base = gm
  modified_base 3^4: mod_base = OTHER; note = phosphorothioate linkage
  modified_base 4: mod_base = OTHER; note = 2'-fluorouridine
  modified_base 5: mod_base = um
  modified_base 6: mod_base = OTHER; note = 2'-fluoroadenosine
  modified_base 7: mod_base = OTHER; note = 2'-O-methyladenosine
  modified_base 8: mod_base = OTHER; note = 2'-fluorocytidine
  modified_base 9: mod_base = OTHER; note = 2'-O-methyladenosine
  modified_base 10: mod_base = OTHER; note = 2'-fluoroadenosine
  modified_base 11: mod_base = um
  modified_base 12: mod_base = OTHER; note = 2'-fluoroadenosine
  modified_base 13: mod_base = um
  modified_base 14: mod_base = OTHER; note = 2'-fluorouridine
  modified_base 15: mod_base = gm
  modified_base 16: mod_base = OTHER; note = 2'-fluorocytidine
  modified_base 17: mod_base = OTHER; note = 2'-O-methyladenosine
  modified_base 18: mod_base = OTHER; note = 2'-fluoroguanosine
  modified_base 19: mod_base = cm
  modified_base 20: mod_base = OTHER; note = 2'-fluoroadenosine
  modified_base 20^21: mod_base = OTHER; note = phosphorothioate linkage
  modified_base 21: mod_base = gm
  source 1..21: mol_type = other RNA
acgttaacaatattgcagcag

SEQ ID NO: 704 - RNA, 21 nt, synthetic construct
  modified_base 1: mod_base = um
  modified_base 1^2: mod_base = OTHER; note = phosphorothioate linkage
  modified_base 2: mod_base = OTHER; note = 2'-fluoroadenosine
  modified_base 2^3: mod_base = OTHER; note = phosphorothioate linkage
  modified_base 3: mod_base = cm
  modified_base 3^4: mod_base = OTHER; note = phosphorothioate linkage
  modified_base 4: mod_base = OTHER; note = 2'-fluoroguanosine
  modified_base 5: mod_base = um
  modified_base 6: mod_base = OTHER; note = 2'-fluorouridine
  modified_base 7: mod_base = OTHER; note = 2'-O-methyladenosine
  modified_base 8: mod_base = OTHER; note = 2'-fluoroadenosine
  modified_base 9: mod_base = cm
  modified_base 10: mod_base = OTHER; note = 2'-fluoroadenosine
  modified_base 11: mod_base = OTHER; note = 2'-O-methyladenosine
  modified_base 12: mod_base = OTHER; note = 2'-fluorouridine
  modified_base 13: mod_base = OTHER; note = 2'-O-methyladenosine
  modified_base 14: mod_base = OTHER; note = 2'-fluorouridine
  modified_base 15: mod_base = um
  modified_base 16: mod_base = OTHER; note = 2'-fluoroguanosine
  modified_base 17: mod_base = cm
  modified_base 18: mod_base = OTHER; note = 2'-fluoroadenosine
  modified_base 19: mod_base = gm
  modified_base 20: mod_base = OTHER; note = 2'-fluorocytidine
  modified_base 20^21: mod_base = OTHER; note = phosphorothioate linkage
  modified_base 21: mod_base = OTHER; note = 2'-O-methyladenosine
  source 1..21: mol_type = other RNA
tacgttaacaatattgcagca

SEQ ID NO: 705 - RNA, 21 nt, synthetic construct
  modified_base 1: mod_base = um
  modified_base 1^2: mod_base = OTHER; note = phosphorothioate linkage
  modified_base 2: mod_base = OTHER; note = 2'-fluoroguanosine
  modified_base 2^3: mod_base = OTHER; note = phosphorothioate linkage
  modified_base 3: mod_base = um
  modified_base 3^4: mod_base = OTHER; note = phosphorothioate linkage
  modified_base 4: mod_base = OTHER; note = 2'-fluorouridine
  modified_base 5: mod_base = um
  modified_base 6: mod_base = OTHER; note = 2'-fluoroadenosine
  modified_base 7: mod_base = gm
  modified_base 8: mod_base = OTHER; note = 2'-fluoroadenosine
  modified_base 9: mod_base = cm
  modified_base 10: mod_base = OTHER; note = 2'-fluorocytidine
  modified_base 11: mod_base = OTHER; note = 2'-O-methyladenosine
  modified_base 12: mod_base = OTHER; note = 2'-fluoroguanosine
  modified_base 13: mod_base = OTHER; note = 2'-O-methyladenosine
  modified_base 14: mod_base = OTHER; note = 2'-fluoroadenosine
  modified_base 15: mod_base = gm
  modified_base 16: mod_base = OTHER; note = 2'-fluoroadenosine
  modified_base 17: mod_base = um
  modified_base 18: mod_base = OTHER; note = 2'-fluorocytidine
  modified_base 19: mod_base = OTHER; note = 2'-O-methyladenosine
  modified_base 20: mod_base = OTHER; note = 2'-fluoroguanosine
  modified_base 20^21: mod_base = OTHER; note = phosphorothioate linkage
  modified_base 21: mod_base = gm
  source 1..21: mol_type = other RNA
tgtttagaccagaagatcagg

SEQ ID NO: 706 - RNA, 21 nt, synthetic construct
  modified_base 1: mod_base = OTHER; note = 2'-O-methyladenosine
  modified_base 1^2: mod_base = OTHER; note = phosphorothioate linkage
  modified_base 2: mod_base = OTHER; note = 2'-fluoroadenosine
  modified_base 2^3: mod_base = OTHER; note = phosphorothioate linkage
  modified_base 3: mod_base = um
  modified_base 3^4: mod_base = OTHER; note = phosphorothioate linkage
  modified_base 4: mod_base = OTHER; note = 2'-fluoroadenosine
  modified_base 5: mod_base = OTHER; note = 2'-O-methyladenosine
  modified_base 6: mod_base = OTHER; note = 2'-fluoroguanosine
  modified_base 7: mod_base = OTHER; note = 2'-O-methyladenosine
  modified_base 8: mod_base = OTHER; note = 2'-fluoroadenosine
  modified_base 9: mod_base = OTHER; note = 2'-O-methyladenosine
  modified_base 10: mod_base = OTHER; note = 2'-fluoroguanosine
  modified_base 11: mod_base = cm
  modified_base 12: mod_base = OTHER; note = 2'-fluoroguanosine
  modified_base 13: mod_base = um
  modified_base 14: mod_base = OTHER; note = 2'-fluorouridine
  modified_base 15: mod_base = cm
  modified_base 16: mod_base = OTHER; note = 2'-fluoroguanosine
  modified_base 17: mod_base = um
  modified_base 18: mod_base = OTHER; note = 2'-fluoroguanosine
  modified_base 19: mod_base = OTHER; note = 2'-O-methyladenosine
  modified_base 20: mod_base = OTHER; note = 2'-fluorouridine
  modified_base 20^21: mod_base = OTHER; note = phosphorothioate linkage
  modified_base 21: mod_base = gm
  source 1..21: mol_type = other RNA
aataagaaagcgttcgtgatg

SEQ ID NO: 707 - RNA, 21 nt, synthetic construct
  modified_base 1: mod_base = um
  modified_base 1^2: mod_base = OTHER; note = phosphorothioate linkage
  modified_base 2: mod_base = OTHER; note = 2'-fluorouridine
  modified_base 2^3: mod_base = OTHER; note = phosphorothioate linkage
  modified_base 3: mod_base = um
  modified_base 3^4: mod_base = OTHER; note = phosphorothioate linkage
  modified_base 4: mod_base = OTHER; note = 2'-fluoroguanosine
  modified_base 5: mod_base = um
  modified_base 6: mod_base = OTHER; note = 2'-fluoroadenosine
  modified_base 7: mod_base = OTHER; note = 2'-O-methyladenosine
  modified_base 8: mod_base = OTHER; note = 2'-fluorouridine
  modified_base 9: mod_base = OTHER; note = 2'-O-methyladenosine
  modified_base 10: mod_base = OTHER; note = 2'-fluoroadenosine
  modified_base 11: mod_base = gm
  modified_base 12: mod_base = OTHER; note = 2'-fluoroadenosine
  modified_base 13: mod_base = OTHER; note = 2'-O-methyladenosine
  modified_base 14: mod_base = OTHER; note = 2'-fluoroadenosine
  modified_base 15: mod_base = gm
  modified_base 16: mod_base = OTHER; note = 2'-fluorocytidine
  modified_base 17: mod_base = gm
  modified_base 18: mod_base = OTHER; note = 2'-fluorouridine
  modified_base 19: mod_base = um
  modified_base 20: mod_base = OTHER; note = 2'-fluorocytidine
  modified_base 20^21: mod_base = OTHER; note = phosphorothioate linkage
  modified_base 21: mod_base = gm
  source 1..21: mol_type = other RNA
tttgtaataagaaagcgttcg

SEQ ID NO: 708 - RNA, 21 nt, synthetic construct
  modified_base 1: mod_base = um
  modified_base 1^2: mod_base = OTHER; note = phosphorothioate linkage
  modified_base 2: mod_base = OTHER; note = 2'-fluoroadenosine
  modified_base 2^3: mod_base = OTHER; note = phosphorothioate linkage
  modified_base 3: mod_base = um
  modified_base 3^4: mod_base = OTHER; note = phosphorothioate linkage
  modified_base 4: mod_base = OTHER; note = 2'-fluorocytidine
  modified_base 5: mod_base = um
  modified_base 6: mod_base = OTHER; note = 2'-fluoroguanosine
  modified_base 7: mod_base = um
  modified_base 8: mod_base = OTHER; note = 2'-fluorouridine
  modified_base 9: mod_base = gm
  modified_base 10: mod_base = OTHER; note = 2'-fluorouridine
  modified_base 11: mod_base = cm
  modified_base 12: mod_base = OTHER; note = 2'-fluoroadenosine
  modified_base 13: mod_base = cm
  modified_base 14: mod_base = OTHER; note = 2'-fluorouridine
  modified_base 15: mod_base = um
  modified_base 16: mod_base = OTHER; note = 2'-fluoroadenosine
  modified_base 17: mod_base = cm
  modified_base 18: mod_base = OTHER; note = 2'-fluorouridine
  modified_base 19: mod_base = gm
  modified_base 20: mod_base = OTHER; note = 2'-fluorouridine
  modified_base 20^21: mod_base = OTHER; note = phosphorothioate linkage
  modified_base 21: mod_base = cm
  source 1..21: mol_type = other RNA
tatctgttgtcacttactgtc

SEQ ID NO: 709 - RNA, 21 nt, synthetic construct
  modified_base 1: mod_base = OTHER; note = 2'-O-methyladenosine
  modified_base 1^2: mod_base = OTHER; note = phosphorothioate linkage
  modified_base 2: mod_base = OTHER; note = 2'-fluoroadenosine
  modified_base 2^3: mod_base = OTHER; note = phosphorothioate linkage
  modified_base 3: mod_base = cm
  modified_base 3^4: mod_base = OTHER; note = phosphorothioate linkage
  modified_base 4: mod_base = OTHER; note = 2'-fluoroadenosine
  modified_base 5: mod_base = um
  modified_base 6: mod_base = OTHER; note = 2'-fluorocytidine
  modified_base 7: mod_base = um
  modified_base 8: mod_base = OTHER; note = 2'-fluoroguanosine
  modified_base 9: mod_base = um
  modified_base 10: mod_base = OTHER; note = 2'-fluorouridine
  modified_base 11: mod_base = gm
  modified_base 12: mod_base = OTHER; note = 2'-fluorouridine
  modified_base 13: mod_base = cm
  modified_base 14: mod_base = OTHER; note = 2'-fluoroadenosine
  modified_base 15: mod_base = cm
  modified_base 16: mod_base = OTHER; note = 2'-fluorouridine
  modified_base 17: mod_base = um
  modified_base 18: mod_base = OTHER; note = 2'-fluoroadenosine
  modified_base 19: mod_base = cm
  modified_base 20: mod_base = OTHER; note = 2'-fluorouridine
  modified_base 20^21: mod_base = OTHER; note = phosphorothioate linkage
  modified_base 21: mod_base = gm
  source 1..21: mol_type = other RNA
aacatctgttgtcacttactg

SEQ ID NO: 710 - RNA, 21 nt, synthetic construct
  modified_base 1: mod_base = um
  modified_base 1^2: mod_base = OTHER; note = phosphorothioate linkage
  modified_base 2: mod_base = OTHER; note = 2'-fluoroguanosine
  modified_base 2^3: mod_base = OTHER; note = phosphorothioate linkage
  modified_base 3: mod_base = OTHER; note = 2'-O-methyladenosine
  modified_base 3^4: mod_base = OTHER; note = phosphorothioate linkage
  modified_base 4: mod_base = OTHER; note = 2'-fluorouridine
  modified_base 5: mod_base = cm
  modified_base 6: mod_base = OTHER; note = 2'-fluorouridine
  modified_base 7: mod_base = um
  modified_base 8: mod_base = OTHER; note = 2'-fluorouridine
  modified_base 9: mod_base = gm
  modified_base 10: mod_base = OTHER; note = 2'-fluorouridine
  modified_base 11: mod_base = cm
  modified_base 12: mod_base = OTHER; note = 2'-fluoroadenosine
  modified_base 13: mod_base = um
  modified_base 14: mod_base = OTHER; note = 2'-fluorocytidine
  modified_base 15: mod_base = cm
  modified_base 16: mod_base = OTHER; note = 2'-fluoroadenosine
  modified_base 17: mod_base = OTHER; note = 2'-O-methyladenosine
  modified_base 18: mod_base = OTHER; note = 2'-fluorouridine
  modified_base 19: mod_base = um
  modified_base 20: mod_base = OTHER; note = 2'-fluorouridine
  modified_base 20^21: mod_base = OTHER; note = phosphorothioate linkage
  modified_base 21: mod_base = gm
  source 1..21: mol_type = other RNA
tgatctttgtcatccaatttg

SEQ ID NO: 711 - RNA, 21 nt, synthetic construct
  modified_base 1: mod_base = um
  modified_base 1^2: mod_base = OTHER; note = phosphorothioate linkage
  modified_base 2: mod_base = OTHER; note = 2'-fluoroadenosine
  modified_base 2^3: mod_base = OTHER; note = phosphorothioate linkage
  modified_base 3: mod_base = um
  modified_base 3^4: mod_base = OTHER; note = phosphorothioate linkage
  modified_base 4: mod_base = OTHER; note = 2'-fluorouridine
  modified_base 5: mod_base = OTHER; note = 2'-O-methyladenosine
  modified_base 6: mod_base = OTHER; note = 2'-fluoroadenosine
  modified_base 7: mod_base = OTHER; note = 2'-O-methyladenosine
  modified_base 8: mod_base = OTHER; note = 2'-fluoroguanosine
  modified_base 9: mod_base = OTHER; note = 2'-O-methyladenosine
  modified_base 10: mod_base = OTHER; note = 2'-fluorouridine
  modified_base 11: mod_base = um
  modified_base 12: mod_base = OTHER; note = 2'-fluoroguanosine
  modified_base 13: mod_base = cm
  modified_base 14: mod_base = OTHER; note = 2'-fluorouridine
  modified_base 15: mod_base = OTHER; note = 2'-O-methyladenosine
  modified_base 16: mod_base = OTHER; note = 2'-fluorouridine
  modified_base 17: mod_base = gm
  modified_base 18: mod_base = OTHER; note = 2'-fluorouridine
  modified_base 19: mod_base = gm
  modified_base 20: mod_base = OTHER; note = 2'-fluoroadenosine
  modified_base 20^21: mod_base = OTHER; note = phosphorothioate linkage
  modified_base 21: mod_base = gm
  source 1..21: mol_type = other RNA
tattaaagattgctatgtgag

SEQ ID NO: 712 - RNA, 21 nt, synthetic construct
  modified_base 1: mod_base = um
  modified_base 1^2: mod_base = OTHER; note = phosphorothioate linkage
  modified_base 2: mod_base = OTHER; note = 2'-fluorouridine
  modified_base 2^3: mod_base = OTHER; note = phosphorothioate linkage
  modified_base 3: mod_base = gm
  modified_base 3^4: mod_base = OTHER; note = phosphorothioate linkage
  modified_base 4: mod_base = OTHER; note = 2'-fluorouridine
  modified_base 5: mod_base = cm
  modified_base 6: mod_base = OTHER; note = 2'-fluorouridine
  modified_base 7: mod_base = OTHER; note = 2'-O-methyladenosine
  modified_base 8: mod_base = OTHER; note = 2'-fluoroadenosine
  modified_base 9: mod_base = cm
  modified_base 10: mod_base = OTHER; note = 2'-fluoroadenosine
  modified_base 11: mod_base = OTHER; note = 2'-O-methyladenosine
  modified_base 12: mod_base = OTHER; note = 2'-fluorocytidine
  modified_base 13: mod_base = OTHER; note = 2'-O-methyladenosine
  modified_base 14: mod_base = OTHER; note = 2'-fluorouridine
  modified_base 15: mod_base = cm
  modified_base 16: mod_base = OTHER; note = 2'-fluoroadenosine
  modified_base 17: mod_base = OTHER; note = 2'-O-methyladenosine
  modified_base 18: mod_base = OTHER; note = 2'-fluoroadenosine
  modified_base 19: mod_base = OTHER; note = 2'-O-methyladenosine
  modified_base 20: mod_base = OTHER; note = 2'-fluoroguanosine
  modified_base 20^21: mod_base = OTHER; note = phosphorothioate linkage
  modified_base 21: mod_base = gm
  source 1..21: mol_type = other RNA
ttgtctaacaacatcaaaagg

SEQ ID NO: 713 - RNA, 21 nt, synthetic construct
  modified_base 1: mod_base = um
  modified_base 1^2: mod_base = OTHER; note = phosphorothioate linkage
  modified_base 2: mod_base = OTHER; note = 2'-fluorocytidine
  modified_base 2^3: mod_base = OTHER; note = phosphorothioate linkage
  modified_base 3: mod_base = um
  modified_base 3^4: mod_base = OTHER; note = phosphorothioate linkage
  modified_base 4: mod_base = OTHER; note = 2'-fluorouridine
  modified_base 5: mod_base = gm
  modified_base 6: mod_base = OTHER; note = 2'-fluoroadenosine
  modified_base 7: mod_base = um
  modified_base 8: mod_base = OTHER; note = 2'-fluorocytidine
  modified_base 9: mod_base = um
  modified_base 10: mod_base = OTHER; note = 2'-fluoroadenosine
  modified_base 11: mod_base = OTHER; note = 2'-O-methyladenosine
  modified_base 12: mod_base = OTHER; note = 2'-fluoroadenosine
  modified_base 13: mod_base = gm
  modified_base 14: mod_base = OTHER; note = 2'-fluorocytidine
  modified_base 15: mod_base = OTHER; note = 2'-O-methyladenosine
  modified_base 16: mod_base = OTHER; note = 2'-fluorouridine
  modified_base 17: mod_base = um
  modified_base 18: mod_base = OTHER; note = 2'-fluoroadenosine
  modified_base 19: mod_base = cm
  modified_base 20: mod_base = OTHER; note = 2'-fluorocytidine
  modified_base 20^21: mod_base = OTHER; note = phosphorothioate linkage
  modified_base 21: mod_base = OTHER; note = 2'-O-methyladenosine
  source 1..21: mol_type = other RNA
tcttgatctaaagcattacca

SEQ ID NO: 714 - RNA, 21 nt, synthetic construct
  modified_base 1: mod_base = um
  modified_base 1^2: mod_base = OTHER; note = phosphorothioate linkage
  modified_base 2: mod_base = OTHER; note = 2'-fluoroguanosine
  modified_base 2^3: mod_base = OTHER; note = phosphorothioate linkage
  modified_base 3: mod_base = um
  modified_base 3^4: mod_base = OTHER; note = phosphorothioate linkage
  modified_base 4: mod_base = OTHER; note = 2'-fluorouridine
  modified_base 5: mod_base = um
  modified_base 6: mod_base = OTHER; note = 2'-fluoroadenosine
  modified_base 7: mod_base = OTHER; note = 2'-O-methyladenosine
  modified_base 8: mod_base = OTHER; note = 2'-fluorocytidine
  modified_base 9: mod_base = um
  modified_base 10: mod_base = OTHER; note = 2'-fluoroadenosine
  modified_base 11: mod_base = gm
  modified_base 12: mod_base = OTHER; note = 2'-fluorocytidine
  modified_base 13: mod_base = OTHER; note = 2'-O-methyladenosine
  modified_base 14: mod_base = OTHER; note = 2'-fluorouridine
  modified_base 15: mod_base = um
  modified_base 16: mod_base = OTHER; note = 2'-fluoroguanosine
  modified_base 17: mod_base = um
  modified_base 18: mod_base = OTHER; note = 2'-fluoroadenosine
  modified_base 19: mod_base = um
  modified_base 20: mod_base = OTHER; note = 2'-fluoroguanosine
  modified_base 20^21: mod_base = OTHER; note = phosphorothioate linkage
  modified_base 21: mod_base = cm
  source 1..21: mol_type = other RNA
tgtttaactagcattgtatgc

SEQ ID NO: 715 - RNA, 21 nt, synthetic construct
  modified_base 1: mod_base = um
  modified_base 1^2: mod_base = OTHER; note = phosphorothioate linkage
  modified_base 2: mod_base = OTHER; note = 2'-fluorouridine
  modified_base 2^3: mod_base = OTHER; note = phosphorothioate linkage
  modified_base 3: mod_base = gm
  modified_base 3^4: mod_base = OTHER; note = phosphorothioate linkage
  modified_base 4: mod_base = OTHER; note = 2'-fluorouridine
  modified_base 5: mod_base = um
  modified_base 6: mod_base = OTHER; note = 2'-fluorouridine
  modified_base 7: mod_base = OTHER; note = 2'-O-methyladenosine
  modified_base 8: mod_base = OTHER; note = 2'-fluoroadenosine
  modified_base 9: mod_base = cm
  modified_base 10: mod_base = OTHER; note = 2'-fluorouridine
  modified_base 11: mod_base = OTHER; note = 2'-O-methyladenosine
  modified_base 12: mod_base = OTHER; note = 2'-fluoroguanosine
  modified_base 13: mod_base = cm
  modified_base 14: mod_base = OTHER; note = 2'-fluoroadenosine
  modified_base 15: mod_base = um
  modified_base 16: mod_base = OTHER; note = 2'-fluorouridine
  modified_base 17: mod_base = gm
  modified_base 18: mod_base = OTHER; note = 2'-fluorouridine
  modified_base 19: mod_base = OTHER; note = 2'-O-methyladenosine
  modified_base 20: mod_base = OTHER; note = 2'-fluorouridine
  modified_base 20^21: mod_base = OTHER; note = phosphorothioate linkage
  modified_base 21: mod_base = gm
  source 1..21: mol_type = other RNA
ttgtttaactagcattgtatg

SEQ ID NO: 716 - RNA, 21 nt, synthetic construct
  modified_base 1: mod_base = um
  modified_base 1^2: mod_base = OTHER; note = phosphorothioate linkage
  modified_base 2: mod_base = OTHER; note = 2'-fluorocytidine
  modified_base 2^3: mod_base = OTHER; note = phosphorothioate linkage
  modified_base 3: mod_base = um
  modified_base 3^4: mod_base = OTHER; note = phosphorothioate linkage
  modified_base 4: mod_base = OTHER; note = 2'-fluorocytidine
  modified_base 5: mod_base = um
  modified_base 6: mod_base = OTHER; note = 2'-fluoroadenosine
  modified_base 7: mod_base = um
  modified_base 8: mod_base = OTHER; note = 2'-fluorocytidine
  modified_base 9: mod_base = OTHER; note = 2'-O-methyladenosine
  modified_base 10: mod_base = OTHER; note = 2'-fluoroguanosine
  modified_base 11: mod_base = OTHER; note = 2'-O-methyladenosine
  modified_base 12: mod_base = OTHER; note = 2'-fluorocytidine
  modified_base 13: mod_base = OTHER; note = 2'-O-methyladenosine
  modified_base 14: mod_base = OTHER; note = 2'-fluorouridine
  modified_base 15: mod_base = um
  modified_base 16: mod_base = OTHER; note = 2'-fluoroadenosine
  modified_base 17: mod_base = um
  modified_base 18: mod_base = OTHER; note = 2'-fluoroguanosine
  modified_base 19: mod_base = cm
  modified_base 20: mod_base = OTHER; note = 2'-fluoroadenosine
  modified_base 20^21: mod_base = OTHER; note = phosphorothioate linkage
  modified_base 21: mod_base = cm
  source 1..21: mol_type = other RNA
tctctatcagacattatgcac

SEQ ID NO: 717 - RNA, 21 nt, synthetic construct
  modified_base 1: mod_base = um
  modified_base 1^2: mod_base = OTHER; note = phosphorothioate linkage
  modified_base 2: mod_base = OTHER; note = 2'-fluorocytidine
  modified_base 2^3: mod_base = OTHER; note = phosphorothioate linkage
  modified_base 3: mod_base = OTHER; note = 2'-O-methyladenosine
  modified_base 3^4: mod_base = OTHER; note = phosphorothioate linkage
  modified_base 4: mod_base = OTHER; note = 2'-fluorouridine
  modified_base 5: mod_base = um
  modified_base 6: mod_base = OTHER; note = 2'-fluoroadenosine
  modified_base 7: mod_base = OTHER; note = 2'-O-methyladenosine
  modified_base 8: mod_base = OTHER; note = 2'-fluoroguanosine
  modified_base 9: mod_base = OTHER; note = 2'-O-methyladenosine
  modified_base 10: mod_base = OTHER; note = 2'-fluorouridine
  modified_base 11: mod_base = cm
  modified_base 12: mod_base = OTHER; note = 2'-fluorouridine
  modified_base 13: mod_base = gm
  modified_base 14: mod_base = OTHER; note = 2'-fluoroadenosine
  modified_base 15: mod_base = OTHER; note = 2'-O-methyladenosine
  modified_base 16: mod_base = OTHER; note = 2'-fluorouridine
  modified_base 17: mod_base = cm
  modified_base 18: mod_base = OTHER; note = 2'-fluoroguanosine
  modified_base 19: mod_base = OTHER; note = 2'-O-methyladenosine
  modified_base 20: mod_base = OTHER; note = 2'-fluorocytidine
  modified_base 20^21: mod_base = OTHER; note = phosphorothioate linkage
  modified_base 21: mod_base = cm
  source 1..21: mol_type = other RNA
tcattaagatctgaatcgacc

SEQ ID NO: 718 - RNA, 21 nt, synthetic construct
  modified_base 1: mod_base = um
  modified_base 1^2: mod_base = OTHER; note = phosphorothioate linkage
  modified_base 2: mod_base = OTHER; note = 2'-fluorocytidine
  modified_base 2^3: mod_base = OTHER; note = phosphorothioate linkage
  modified_base 3: mod_base = cm
  modified_base 3^4: mod_base = OTHER; note = phosphorothioate linkage
  modified_base 4: mod_base = OTHER; note = 2'-fluoroadenosine
  modified_base 5: mod_base = OTHER; note = 2'-O-methyladenosine
  modified_base 6: mod_base = OTHER; note = 2'-fluorouridine
  modified_base 7: mod_base = um
  modified_base 8: mod_base = OTHER; note = 2'-fluorouridine
  modified_base 9: mod_base = gm
  modified_base 10: mod_base = OTHER; note = 2'-fluoroguanosine
  modified_base 11: mod_base = um
  modified_base 12: mod_base = OTHER; note = 2'-fluorocytidine
  modified_base 13: mod_base = OTHER; note = 2'-O-methyladenosine
  modified_base 14: mod_base = OTHER; note = 2'-fluorouridine
  modified_base 15: mod_base = cm
  modified_base 16: mod_base = OTHER; note = 2'-fluorouridine
  modified_base 17: mod_base = gm
  modified_base 18: mod_base = OTHER; note = 2'-fluoroguanosine
  modified_base 19: mod_base = OTHER; note = 2'-O-methyladenosine
  modified_base 20: mod_base = OTHER; note = 2'-fluorocytidine
  modified_base 20^21: mod_base = OTHER; note = phosphorothioate linkage
  modified_base 21: mod_base = cm
  source 1..21: mol_type = other RNA
tccaatttggtcatctggacc

SEQ ID NO: 719 - RNA, 21 nt, synthetic construct
  modified_base 1: mod_base = um
  modified_base 1^2: mod_base = OTHER; note = phosphorothioate linkage
  modified_base 2: mod_base = OTHER; note = 2'-fluorocytidine
  modified_base 2^3: mod_base = OTHER; note = phosphorothioate linkage
  modified_base 3: mod_base = OTHER; note = 2'-O-methyladenosine
  modified_base 3^4: mod_base = OTHER; note = phosphorothioate linkage
  modified_base 4: mod_base = OTHER; note = 2'-fluoroadenosine
  modified_base 5: mod_base = OTHER; note = 2'-O-methyladenosine
  modified_base 6: mod_base = OTHER; note = 2'-fluorouridine
  modified_base 7: mod_base = um
  modified_base 8: mod_base = OTHER; note = 2'-fluoroguanosine
  modified_base 9: mod_base = um
  modified_base 10: mod_base = OTHER; note = 2'-fluoroguanosine
  modified_base 11: mod_base = cm
  modified_base 12: mod_base = OTHER; note = 2'-fluoroadenosine
  modified_base 13: mod_base = OTHER; note = 2'-O-methyladenosine
  modified_base 14: mod_base = OTHER; note = 2'-fluorouridine
  modified_base 15: mod_base = um
  modified_base 16: mod_base = OTHER; note = 2'-fluorouridine
  modified_base 17: mod_base = gm
  modified_base 18: mod_base = OTHER; note = 2'-fluorocytidine
  modified_base 19: mod_base = gm
  modified_base 20: mod_base = OTHER; note = 2'-fluoroguanosine
  modified_base 20^21: mod_base = OTHER; note = phosphorothioate linkage
  modified_base 21: mod_base = cm
  source 1..21: mol_type = other RNA
tcaaattgtgcaatttgcggc

SEQ ID NO: 720 - RNA, 21 nt, synthetic construct
  modified_base 1: mod_base = um
  modified_base 1^2: mod_base = OTHER; note = phosphorothioate linkage
  modified_base 2: mod_base = OTHER; note = 2'-fluoroguanosine
  modified_base 2^3: mod_base = OTHER; note = phosphorothioate linkage
  modified_base 3: mod_base = OTHER; note = 2'-O-methyladenosine
  modified_base 3^4: mod_base = OTHER; note = phosphorothioate linkage
  modified_base 4: mod_base = OTHER; note = 2'-fluoroadenosine
  modified_base 5: mod_base = um
  modified_base 6: mod_base = OTHER; note = 2'-fluoroguanosine
  modified_base 7: mod_base = um
  modified_base 8: mod_base = OTHER; note = 2'-fluorouridine
  modified_base 9: mod_base = um
  modified_base 10: mod_base = OTHER; note = 2'-fluorouridine
  modified_base 11: mod_base = gm
  modified_base 12: mod_base = OTHER; note = 2'-fluorouridine
  modified_base 13: mod_base = OTHER; note = 2'-O-methyladenosine
  modified_base 14: mod_base = OTHER; note = 2'-fluorouridine
  modified_base 15: mod_base = gm
  modified_base 16: mod_base = OTHER; note = 2'-fluorocytidine
  modified_base 17: mod_base = gm
  modified_base 18: mod_base = OTHER; note = 2'-fluorouridine
  modified_base 19: mod_base = cm
  modified_base 20: mod_base = OTHER; note = 2'-fluoroadenosine
  modified_base 20^21: mod_base = OTHER; note = phosphorothioate linkage
  modified_base 21: mod_base = cm
  source 1..21: mol_type = other RNA
tgaatgttttgtatgcgtcac

SEQ ID NO: 721 - RNA, 21 nt, synthetic construct
  modified_base 1: mod_base = um
  modified_base 1^2: mod_base = OTHER; note = phosphorothioate linkage
  modified_base 2: mod_base = OTHER; note = 2'-fluoroguanosine
  modified_base 2^3: mod_base = OTHER; note = phosphorothioate linkage
  modified_base 3: mod_base = gm
  modified_base 3^4: mod_base = OTHER; note = phosphorothioate linkage
  modified_base 4: mod_base = OTHER; note = 2'-fluoroadenosine
  modified_base 5: mod_base = OTHER; note = 2'-O-methyladenosine
  modified_base 6: mod_base = OTHER; note = 2'-fluorouridine
  modified_base 7: mod_base = um
  modified_base 8: mod_base = OTHER; note = 2'-fluorouridine
  modified_base 9: mod_base = OTHER; note = 2'-O-methyladenosine
  modified_base 10: mod_base = OTHER; note = 2'-fluoroadenosine
  modified_base 11: mod_base = gm
  modified_base 12: mod_base = OTHER; note = 2'-fluoroguanosine
  modified_base 13: mod_base = um
  modified_base 14: mod_base = OTHER; note = 2'-fluorocytidine
  modified_base 15: mod_base = um
  modified_base 16: mod_base = OTHER; note = 2'-fluorouridine
  modified_base 17: mod_base = cm
  modified_base 18: mod_base = OTHER; note = 2'-fluorocytidine
  modified_base 19: mod_base = um
  modified_base 20: mod_base = OTHER; note = 2'-fluorouridine
  modified_base 20^21: mod_base = OTHER; note = phosphorothioate linkage
  modified_base 21: mod_base = gm
  source 1..21: mol_type = other RNA
tggaatttaaggtcttccttg

SEQ ID NO: 722 - RNA, 21 nt, synthetic construct
  modified_base 1: mod_base = um
  modified_base 1^2: mod_base = OTHER; note = phosphorothioate linkage
  modified_base 2: mod_base = OTHER; note = 2'-fluoroguanosine
  modified_base 2^3: mod_base = OTHER; note = phosphorothioate linkage
  modified_base 3: mod_base = cm
  modified_base 3^4: mod_base = OTHER; note = phosphorothioate linkage
  modified_base 4: mod_base = OTHER; note = 2'-fluorouridine
  modified_base 5: mod_base = OTHER; note = 2'-O-methyladenosine
  modified_base 6: mod_base = OTHER; note = 2'-fluorouridine
  modified_base 7: mod_base = um
  modified_base 8: mod_base = OTHER; note = 2'-fluoroguanosine
  modified_base 9: mod_base = gm
  modified_base 10: mod_base = OTHER; note = 2'-fluorouridine
  modified_base 11: mod_base = gm
  modified_base 12: mod_base = OTHER; note = 2'-fluorouridine
  modified_base 13: mod_base = um
  modified_base 14: mod_base = OTHER; note = 2'-fluoroadenosine
  modified_base 15: mod_base = OTHER; note = 2'-O-methyladenosine
  modified_base 16: mod_base = OTHER; note = 2'-fluorouridine
  modified_base 17: mod_base = um
  modified_base 18: mod_base = OTHER; note = 2'-fluoroguanosine
  modified_base 19: mod_base = gm
  modified_base 20: mod_base = OTHER; note = 2'-fluoroadenosine
  modified_base 20^21: mod_base = OTHER; note = phosphorothioate linkage
  modified_base 21: mod_base = cm
  source 1..21: mol_type = other RNA
tgctattggtgttaattggac

SEQ ID NO: 723 - RNA, 21 nt, synthetic construct
  modified_base 1: mod_base = OTHER; note = 2'-O-methyladenosine
  modified_base 1^2: mod_base = OTHER; note = phosphorothioate linkage
  modified_base 2: mod_base = OTHER; note = 2'-fluoroguanosine
  modified_base 2^3: mod_base = OTHER; note = phosphorothioate linkage
  modified_base 3: mod_base = um
  modified_base 3^4: mod_base = OTHER; note = phosphorothioate linkage
  modified_base 4: mod_base = OTHER; note = 2'-fluoroadenosine
  modified_base 5: mod_base = gm
  modified_base 6: mod_base = OTHER; note = 2'-fluoroadenosine
  modified_base 7: mod_base = OTHER; note = 2'-O-methyladenosine
  modified_base 8: mod_base = OTHER; note = 2'-fluoroadenosine
  modified_base 9: mod_base = um
  modified_base 10: mod_base = OTHER; note = 2'-fluoroadenosine
  modified_base 11: mod_base = cm
  modified_base 12: mod_base = OTHER; note = 2'-fluorocytidine
  modified_base 13: mod_base = OTHER; note = 2'-O-methyladenosine
  modified_base 14: mod_base = OTHER; note = 2'-fluorouridine
  modified_base 15: mod_base = cm
  modified_base 16: mod_base = OTHER; note = 2'-fluorouridine
  modified_base 17: mod_base = um
  modified_base 18: mod_base = OTHER; note = 2'-fluoroguanosine
  modified_base 19: mod_base = gm
  modified_base 20: mod_base = OTHER; note = 2'-fluoroadenosine
  modified_base 20^21: mod_base = OTHER; note = phosphorothioate linkage
  modified_base 21: mod_base = cm
  source 1..21: mol_type = other RNA
agtagaaataccatcttggac

SEQ ID NO: 724 - RNA, 21 nt, synthetic construct
  modified_base 1: mod_base = um
  modified_base 1^2: mod_base = OTHER; note = phosphorothioate linkage
  modified_base 2: mod_base = OTHER; note = 2'-fluoroguanosine
  modified_base 2^3: mod_base = OTHER; note = phosphorothioate linkage
  modified_base 3: mod_base = um
  modified_base 3^4: mod_base = OTHER; note = phosphorothioate linkage
  modified_base 4: mod_base = OTHER; note = 2'-fluoroadenosine
  modified_base 5: mod_base = gm
  modified_base 6: mod_base = OTHER; note = 2'-fluorouridine
  modified_base 7: mod_base = OTHER; note = 2'-O-methyladenosine
  modified_base 8: mod_base = OTHER; note = 2'-fluoroguanosine
  modified_base 9: mod_base = OTHER; note = 2'-O-methyladenosine
  modified_base 10: mod_base = OTHER; note = 2'-fluoroadenosine
  modified_base 11: mod_base = OTHER; note = 2'-O-methyladenosine
  modified_base 12: mod_base = OTHER; note = 2'-fluorouridine
  modified_base 13: mod_base = OTHER; note = 2'-O-methyladenosine
  modified_base 14: mod_base = OTHER; note = 2'-fluorocytidine
  modified_base 15: mod_base = cm
  modified_base 16: mod_base = OTHER; note = 2'-fluoroadenosine
  modified_base 17: mod_base = um
  modified_base 18: mod_base = OTHER; note = 2'-fluorocytidine
  modified_base 19: mod_base = um
  modified_base 20: mod_base = OTHER; note = 2'-fluorouridine
  modified_base 20^21: mod_base = OTHER; note = phosphorothioate linkage
  modified_base 21: mod_base = gm
  source 1..21: mol_type = other RNA
tgtagtagaaataccatcttg

SEQ ID NO: 725 - RNA, 21 nt, synthetic construct
  modified_base 1: mod_base = um
  modified_base 1^2: mod_base = OTHER; note = phosphorothioate linkage
  modified_base 2: mod_base = OTHER; note = 2'-fluorouridine
  modified_base 2^3: mod_base = OTHER; note = phosphorothioate linkage
  modified_base 3: mod_base = gm
  modified_base 3^4: mod_base = OTHER; note = phosphorothioate linkage
  modified_base 4: mod_base = OTHER; note = 2'-fluoroadenosine
  modified_base 5: mod_base = um
  modified_base 6: mod_base = OTHER; note = 2'-fluorocytidine
  modified_base 7: mod_base = um
  modified_base 8: mod_base = OTHER; note = 2'-fluorouridine
  modified_base 9: mod_base = um
  modified_base 10: mod_base = OTHER; note = 2'-fluorouridine
  modified_base 11: mod_base = gm
  modified_base 12: mod_base = OTHER; note = 2'-fluoroguanosine
  modified_base 13: mod_base = um
  modified_base 14: mod_base = OTHER; note = 2'-fluoroguanosine
  modified_base 15: mod_base = um
  modified_base 16: mod_base = OTHER; note = 2'-fluoroadenosine
  modified_base 17: mod_base = um
  modified_base 18: mod_base = OTHER; note = 2'-fluorouridine
  modified_base 19: mod_base = cm
  modified_base 20: mod_base = OTHER; note = 2'-fluoroadenosine
  modified_base 20^21: mod_base = OTHER; note = phosphorothioate linkage
  modified_base 21: mod_base = cm
  source 1..21: mol_type = other RNA
ttgatcttttggtgtattcac

SEQ ID NO: 726 - RNA, 21 nt, synthetic construct
  modified_base 1: mod_base = um
  modified_base 1^2: mod_base = OTHER; note = phosphorothioate linkage
  modified_base 2: mod_base = OTHER; note = 2'-fluoroadenosine
  modified_base 2^3: mod_base = OTHER; note = phosphorothioate linkage
  modified_base 3: mod_base = gm
  modified_base 3^4: mod_base = OTHER; note = phosphorothioate linkage
  modified_base 4: mod_base = OTHER; note = 2'-fluorocytidine
  modified_base 5: mod_base = OTHER; note = 2'-O-methyladenosine
  modified_base 6: mod_base = OTHER; note = 2'-fluoroguanosine
  modified_base 7: mod_base = OTHER; note = 2'-O-methyladenosine
  modified_base 8: mod_base = OTHER; note = 2'-fluorouridine
  modified_base 9: mod_base = um
  modified_base 10: mod_base = OTHER; note = 2'-fluorouridine
  modified_base 11: mod_base = cm
  modified_base 12: mod_base = OTHER; note = 2'-fluorouridine
  modified_base 13: mod_base = um
  modified_base 14: mod_base = OTHER; note = 2'-fluoroadenosine
  modified_base 15: mod_base = gm
  modified_base 16: mod_base = OTHER; note = 2'-fluorouridine
  modified_base 17: mod_base = gm
  modified_base 18: mod_base = OTHER; note = 2'-fluoroadenosine
  modified_base 19: mod_base = cm
  modified_base 20: mod_base = OTHER; note = 2'-fluoroadenosine
  modified_base 20^21: mod_base = OTHER; note = phosphorothioate linkage
  modified_base 21: mod_base = gm
  source 1..21: mol_type = other RNA
tagcagatttcttagtgacag

SEQ ID NO: 727 - RNA, 21 nt, synthetic construct
  modified_base 1: mod_base = um
  modified_base 1^2: mod_base = OTHER; note = phosphorothioate linkage
  modified_base 2: mod_base = OTHER; note = 2'-fluorouridine
  modified_base 2^3: mod_base = OTHER; note = phosphorothioate linkage
  modified_base 3: mod_base = OTHER; note = 2'-O-methyladenosine
  modified_base 3^4: mod_base = OTHER; note = phosphorothioate linkage
  modified_base 4: mod_base = OTHER; note = 2'-fluorocytidine
  modified_base 5: mod_base = OTHER; note = 2'-O-methyladenosine
  modified_base 6: mod_base = OTHER; note = 2'-fluorouridine
  modified_base 7: mod_base = um
  modified_base 8: mod_base = OTHER; note = 2'-fluoroguanosine
  modified_base 9: mod_base = um
  modified_base 10: mod_base = OTHER; note = 2'-fluoroadenosine
  modified_base 11: mod_base = um
  modified_base 12: mod_base = OTHER; note = 2'-fluoroguanosine
  modified_base 13: mod_base = cm
  modified_base 14: mod_base = OTHER; note = 2'-fluorouridine
  modified_base 15: mod_base = um
  modified_base 16: mod_base = OTHER; note = 2'-fluorouridine
  modified_base 17: mod_base = OTHER; note = 2'-O-methyladenosine
  modified_base 18: mod_base = OTHER; note = 2'-fluoroguanosine
  modified_base 19: mod_base = um
  modified_base 20: mod_base = OTHER; note = 2'-fluoroguanosine
  modified_base 20^21: mod_base = OTHER; note = phosphorothioate linkage
  modified_base 21: mod_base = gm
  source 1..21: mol_type = other RNA
ttacattgtatgctttagtgg

SEQ ID NO: 728 - RNA, 21 nt, synthetic construct
  modified_base 1: mod_base = um
  modified_base 1^2: mod_base = OTHER; note = phosphorothioate linkage
  modified_base 2: mod_base = OTHER; note = 2'-fluoroguanosine
  modified_base 2^3: mod_base = OTHER; note = phosphorothioate linkage
  modified_base 3: mod_base = um
  modified_base 3^4: mod_base = OTHER; note = phosphorothioate linkage
  modified_base 4: mod_base = OTHER; note = 2'-fluoroadenosine
  modified_base 5: mod_base = OTHER; note = 2'-O-methyladenosine
  modified_base 6: mod_base = OTHER; note = 2'-fluorouridine
  modified_base 7: mod_base = cm
  modified_base 8: mod_base = OTHER; note = 2'-fluoroadenosine
  modified_base 9: mod_base = gm
  modified_base 10: mod_base = OTHER; note = 2'-fluorouridine
  modified_base 11: mod_base = um
  modified_base 12: mod_base = OTHER; note = 2'-fluorocytidine
  modified_base 13: mod_base = cm
  modified_base 14: mod_base = OTHER; note = 2'-fluorouridine
  modified_base 15: mod_base = um
  modified_base 16: mod_base = OTHER; note = 2'-fluoroguanosine
  modified_base 17: mod_base = um
  modified_base 18: mod_base = OTHER; note = 2'-fluorocytidine
  modified_base 19: mod_base = um
  modified_base 20: mod_base = OTHER; note = 2'-fluoroguanosine
  modified_base 20^21: mod_base = OTHER; note = phosphorothioate linkage
  modified_base 21: mod_base = cm
  source 1..21: mol_type = other RNA
tgtaatcagttccttgtctgc

SEQ ID NO: 729 - RNA, 21 nt, synthetic construct
  modified_base 1: mod_base = um
  modified_base 1^2: mod_base = OTHER; note = phosphorothioate linkage
  modified_base 2: mod_base = OTHER; note = 2'-fluorouridine
  modified_base 2^3: mod_base = OTHER; note = phosphorothioate linkage
  modified_base 3: mod_base = um
  modified_base 3^4: mod_base = OTHER; note = phosphorothioate linkage
  modified_base 4: mod_base = OTHER; note = 2'-fluoroguanosine
  modified_base 5: mod_base = um
  modified_base 6: mod_base = OTHER; note = 2'-fluoroadenosine
  modified_base 7: mod_base = OTHER; note = 2'-O-methyladenosine
  modified_base 8: mod_base = OTHER; note = 2'-fluorouridine
  modified_base 9: mod_base = cm
  modified_base 10: mod_base = OTHER; note = 2'-fluoroadenosine
  modified_base 11: mod_base = gm
  modified_base 12: mod_base = OTHER; note = 2'-fluorouridine
  modified_base 13: mod_base = um
  modified_base 14: mod_base = OTHER; note = 2'-fluorocytidine
  modified_base 15: mod_base = cm
  modified_base 16: mod_base = OTHER; note = 2'-fluorouridine
  modified_base 17: mod_base = um
  modified_base 18: mod_base = OTHER; note = 2'-fluoroguanosine
  modified_base 19: mod_base = um
  modified_base 20: mod_base = OTHER; note = 2'-fluorocytidine
  modified_base 20^21: mod_base = OTHER; note = phosphorothioate linkage
  modified_base 21: mod_base = cm
  source 1..21: mol_type = other RNA
tttgtaatcagttccttgtcc

SEQ ID NO: 730 - RNA, 21 nt, synthetic construct
  modified_base 1: mod_base = um
  modified_base 1^2: mod_base = OTHER; note = phosphorothioate linkage
  modified_base 2: mod_base = OTHER; note = 2'-fluorocytidine
  modified_base 2^3: mod_base = OTHER; note = phosphorothioate linkage
  modified_base 3: mod_base = OTHER; note = 2'-O-methyladenosine
  modified_base 3^4: mod_base = OTHER; note = phosphorothioate linkage
  modified_base 4: mod_base = OTHER; note = 2'-fluoroadenosine
  modified_base 5: mod_base = um
  modified_base 6: mod_base = OTHER; note = 2'-fluoroguanosine
  modified_base 7: mod_base = um
  modified_base 8: mod_base = OTHER; note = 2'-fluorouridine
  modified_base 9: mod_base = um
  modified_base 10: mod_base = OTHER; note = 2'-fluoroguanosine
  modified_base 11: mod_base = um
  modified_base 12: mod_base = OTHER; note = 2'-fluoroadenosine
  modified_base 13: mod_base = OTHER; note = 2'-O-methyladenosine
  modified_base 14: mod_base = OTHER; note = 2'-fluorouridine
  modified_base 15: mod_base = cm
  modified_base 16: mod_base = OTHER; note = 2'-fluoroadenosine
  modified_base 17: mod_base = gm
  modified_base 18: mod_base = OTHER; note = 2'-fluorouridine
  modified_base 19: mod_base = um
  modified_base 20: mod_base = OTHER; note = 2'-fluorocytidine
  modified_base 20^21: mod_base = OTHER; note = phosphorothioate linkage
  modified_base 21: mod_base = cm
  source 1..21: mol_type = other RNA
tcaatgtttgtaatcagttcc

SEQ ID NO: 731 - RNA, 21 nt, synthetic construct
  modified_base 1: mod_base = um
  modified_base 1^2: mod_base = OTHER; note = phosphorothioate linkage
  modified_base 2: mod_base = OTHER; note = 2'-fluorocytidine
  modified_base 2^3: mod_base = OTHER; note = phosphorothioate linkage
  modified_base 3: mod_base = gm
  modified_base 3^4: mod_base = OTHER; note = phosphorothioate linkage
  modified_base 4: mod_base = OTHER; note = 2'-fluorouridine
  modified_base 5: mod_base = cm
  modified_base 6: mod_base = OTHER; note = 2'-fluoroadenosine
  modified_base 7: mod_base = OTHER; note = 2'-O-methyladenosine
  modified_base 8: mod_base = OTHER; note = 2'-fluorouridine
  modified_base 9: mod_base = OTHER; note = 2'-O-methyladenosine
  modified_base 10: mod_base = OTHER; note = 2'-fluorouridine
  modified_base 11: mod_base = gm
  modified_base 12: mod_base = OTHER; note = 2'-fluorocytidine
  modified_base 13: mod_base = um
  modified_base 14: mod_base = OTHER; note = 2'-fluorouridine
  modified_base 15: mod_base = OTHER; note = 2'-O-methyladenosine
  modified_base 16: mod_base = OTHER; note = 2'-fluorouridine
  modified_base 17: mod_base = um
  modified_base 18: mod_base = OTHER; note = 2'-fluorocytidine
  modified_base 19: mod_base = OTHER; note = 2'-O-methyladenosine
  modified_base 20: mod_base = OTHER; note = 2'-fluoroguanosine
  modified_base 20^21: mod_base = OTHER; note = phosphorothioate linkage
  modified_base 21: mod_base = cm
  source 1..21: mol_type = other RNA
tcgtcaatatgcttattcagc

SEQ ID NO: 732 - RNA, 21 nt, synthetic construct
  modified_base 1: mod_base = um
  modified_base 1^2: mod_base = OTHER; note = phosphorothioate linkage
  modified_base 2: mod_base = OTHER; note = 2'-fluorocytidine
  modified_base 2^3: mod_base = OTHER; note = phosphorothioate linkage
  modified_base 3: mod_base = OTHER; note = 2'-O-methyladenosine
  modified_base 3^4: mod_base = OTHER; note = phosphorothioate linkage
  modified_base 4: mod_base = OTHER; note = 2'-fluorouridine
  modified_base 5: mod_base = OTHER; note = 2'-O-methyladenosine
  modified_base 6: mod_base = OTHER; note = 2'-fluoroadenosine
  modified_base 7: mod_base = gm
  modified_base 8: mod_base = OTHER; note = 2'-fluorocytidine
  modified_base 9: mod_base = OTHER; note = 2'-O-methyladenosine
  modified_base 10: mod_base = OTHER; note = 2'-fluorocytidine
  modified_base 11: mod_base = um
  modified_base 12: mod_base = OTHER; note = 2'-fluorocytidine
  modified_base 13: mod_base = um
  modified_base 14: mod_base = OTHER; note = 2'-fluorouridine
  modified_base 15: mod_base = OTHER; note = 2'-O-methyladenosine
  modified_base 16: mod_base = OTHER; note = 2'-fluoroadenosine
  modified_base 17: mod_base = gm
  modified_base 18: mod_base = OTHER; note = 2'-fluoroadenosine
  modified_base 19: mod_base = OTHER; note = 2'-O-methyladenosine
  modified_base 20: mod_base = OTHER; note = 2'-fluoroguanosine
  modified_base 20^21: mod_base = OTHER; note = phosphorothioate linkage
  modified_base 21: mod_base = cm
  source 1..21: mol_type = other RNA
tcataagcactcttaagaagc

SEQ ID NO: 733 - RNA, 21 nt, synthetic construct
  modified_base 1: mod_base = um
  modified_base 1^2: mod_base = OTHER; note = phosphorothioate linkage
  modified_base 2: mod_base = OTHER; note = 2'-fluorouridine
  modified_base 2^3: mod_base = OTHER; note = phosphorothioate linkage
  modified_base 3: mod_base = OTHER; note = 2'-O-methyladenosine
  modified_base 3^4: mod_base = OTHER; note = phosphorothioate linkage
  modified_base 4: mod_base = OTHER; note = 2'-fluoroguanosine
  modified_base 5: mod_base = OTHER; note = 2'-O-methyladenosine
  modified_base 6: mod_base = OTHER; note = 2'-fluorouridine
  modified_base 7: mod_base = OTHER; note = 2'-O-methyladenosine
  modified_base 8: mod_base = OTHER; note = 2'-fluoroadenosine
  modified_base 9: mod_base = gm
  modified_base 10: mod_base = OTHER; note = 2'-fluoroadenosine
  modified_base 11: mod_base = cm
  modified_base 12: mod_base = OTHER; note = 2'-fluoroadenosine
  modified_base 13: mod_base = um
  modified_base 14: mod_base = OTHER; note = 2'-fluorouridine
  modified_base 15: mod_base = gm
  modified_base 16: mod_base = OTHER; note = 2'-fluorouridine
  modified_base 17: mod_base = cm
  modified_base 18: mod_base = OTHER; note = 2'-fluorouridine
  modified_base 19: mod_base = OTHER; note = 2'-O-methyladenosine
  modified_base 20: mod_base = OTHER; note = 2'-fluoroadenosine
  modified_base 20^21: mod_base = OTHER; note = phosphorothioate linkage
  modified_base 21: mod_base = gm
  source 1..21: mol_type = other RNA
ttagataagacattgtctaag

SEQ ID NO: 734 - RNA, 21 nt, synthetic construct
  modified_base 1: mod_base = um
  modified_base 1^2: mod_base = OTHER; note = phosphorothioate linkage
  modified_base 2: mod_base = OTHER; note = 2'-fluoroadenosine
  modified_base 2^3: mod_base = OTHER; note = phosphorothioate linkage
  modified_base 3: mod_base = um
  modified_base 3^4: mod_base = OTHER; note = phosphorothioate linkage
  modified_base 4: mod_base = OTHER; note = 2'-fluoroguanosine
  modified_base 5: mod_base = OTHER; note = 2'-O-methyladenosine
  modified_base 6: mod_base = OTHER; note = 2'-fluoroadenosine
  modified_base 7: mod_base = gm
  modified_base 8: mod_base = OTHER; note = 2'-fluoroadenosine
  modified_base 9: mod_base = um
  modified_base 10: mod_base = OTHER; note = 2'-fluorouridine
  modified_base 11: mod_base = gm
  modified_base 12: mod_base = OTHER; note = 2'-fluorocytidine
  modified_base 13: mod_base = cm
  modified_base 14: mod_base = OTHER; note = 2'-fluoroadenosine
  modified_base 15: mod_base = um
  modified_base 16: mod_base = OTHER; note = 2'-fluorouridine
  modified_base 17: mod_base = OTHER; note = 2'-O-methyladenosine
  modified_base 18: mod_base = OTHER; note = 2'-fluoroadenosine
  modified_base 19: mod_base = um
  modified_base 20: mod_base = OTHER; note = 2'-fluoroguanosine
  modified_base 20^21: mod_base = OTHER; note = phosphorothioate linkage
  modified_base 21: mod_base = cm
  source 1..21: mol_type = other RNA
tatgaagattgccattaatgc

SEQ ID NO: 735 - RNA, 21 nt, synthetic construct
  modified_base 1: mod_base = OTHER; note = 2'-O-methyladenosine
  modified_base 1^2: mod_base = OTHER; note = phosphorothioate linkage
  modified_base 2: mod_base = OTHER; note = 2'-fluoroadenosine
  modified_base 2^3: mod_base = OTHER; note = phosphorothioate linkage
  modified_base 3: mod_base = OTHER; note = 2'-O-methyladenosine
  modified_base 3^4: mod_base = OTHER; note = phosphorothioate linkage
  modified_base 4: mod_base = OTHER; note = 2'-fluorocytidine
  modified_base 5: mod_base = gm
  modified_base 6: mod_base = OTHER; note = 2'-fluorouridine
  modified_base 7: mod_base = OTHER; note = 2'-O-methyladenosine
  modified_base 8: mod_base = OTHER; note = 2'-fluorouridine
  modified_base 9: mod_base = um
  modified_base 10: mod_base = OTHER; note = 2'-fluoroadenosine
  modified_base 11: mod_base = OTHER; note = 2'-O-methyladenosine
  modified_base 12: mod_base = OTHER; note = 2'-fluorocytidine
  modified_base 13: mod_base = gm
  modified_base 14: mod_base = OTHER; note = 2'-fluorouridine
  modified_base 15: mod_base = OTHER; note = 2'-O-methyladenosine
  modified_base 16: mod_base = OTHER; note = 2'-fluoroadenosine
  modified_base 17: mod_base = gm
  modified_base 18: mod_base = OTHER; note = 2'-fluorocytidine
  modified_base 19: mod_base = OTHER; note = 2'-O-methyladenosine
  modified_base 20: mod_base = OTHER; note = 2'-fluorouridine
  modified_base 20^21: mod_base = OTHER; note = phosphorothioate linkage
  modified_base 21: mod_base = cm
  source 1..21: mol_type = other RNA
aaacgtattaacgtaagcatc

SEQ ID NO: 736 - RNA, 21 nt, synthetic construct
  modified_base 1: mod_base = um
  modified_base 1^2: mod_base = OTHER; note = phosphorothioate linkage
  modified_base 2: mod_base = OTHER; note = 2'-fluorocytidine
  modified_base 2^3: mod_base = OTHER; note = phosphorothioate linkage
  modified_base 3: mod_base = um
  modified_base 3^4: mod_base = OTHER; note = phosphorothioate linkage
  modified_base 4: mod_base = OTHER; note = 2'-fluorouridine
  modified_base 5: mod_base = OTHER; note = 2'-O-methyladenosine
  modified_base 6: mod_base = OTHER; note = 2'-fluoroadenosine
  modified_base 7: mod_base = gm
  modified_base 8: mod_base = OTHER; note = 2'-fluoroadenosine
  modified_base 9: mod_base = um
  modified_base 10: mod_base = OTHER; note = 2'-fluorouridine
  modified_base 11: mod_base = gm
  modified_base 12: mod_base = OTHER; note = 2'-fluorouridine
  modified_base 13: mod_base = cm
  modified_base 14: mod_base = OTHER; note = 2'-fluoroadenosine
  modified_base 15: mod_base = OTHER; note = 2'-O-methyladenosine
  modified_base 16: mod_base = OTHER; note = 2'-fluoroadenosine
  modified_base 17: mod_base = gm
  modified_base 18: mod_base = OTHER; note = 2'-fluoroguanosine
  modified_base 19: mod_base = um
  modified_base 20: mod_base = OTHER; note = 2'-fluoroguanosine
  modified_base 20^21: mod_base = OTHER; note = phosphorothioate linkage
  modified_base 21: mod_base = cm
  source 1..21: mol_type = other RNA
tcttaagattgtcaaaggtgc

SEQ ID NO: 737 - RNA, 21 nt, synthetic construct
  modified_base 1: mod_base = um
  modified_base 1^2: mod_base = OTHER; note = phosphorothioate linkage
  modified_base 2: mod_base = OTHER; note = 2'-fluorouridine
  modified_base 2^3: mod_base = OTHER; note = phosphorothioate linkage
  modified_base 3: mod_base = gm
  modified_base 3^4: mod_base = OTHER; note = phosphorothioate linkage
  modified_base 4: mod_base = OTHER; note = 2'-fluoroadenosine
  modified_base 5: mod_base = um
  modified_base 6: mod_base = OTHER; note = 2'-fluorouridine
  modified_base 7: mod_base = OTHER; note = 2'-O-methyladenosine
  modified_base 8: mod_base = OTHER; note = 2'-fluorouridine
  modified_base 9: mod_base = cm
  modified_base 10: mod_base = OTHER; note = 2'-fluorouridine
  modified_base 11: mod_base = OTHER; note = 2'-O-methyladenosine
  modified_base 12: mod_base = OTHER; note = 2'-fluoroadenosine
  modified_base 13: mod_base = um
  modified_base 14: mod_base = OTHER; note = 2'-fluoroguanosine
  modified_base 15: mod_base = um
  modified_base 16: mod_base = OTHER; note = 2'-fluorocytidine
  modified_base 17: mod_base = OTHER; note = 2'-O-methyladenosine
  modified_base 18: mod_base = OTHER; note = 2'-fluoroguanosine
  modified_base 19: mod_base = um
  modified_base 20: mod_base = OTHER; note = 2'-fluoroadenosine
  modified_base 20^21: mod_base = OTHER; note = phosphorothioate linkage
  modified_base 21: mod_base = cm
  source 1..21: mol_type = other RNA
ttgattatctaatgtcagtac

SEQ ID NO: 738 - RNA, 21 nt, synthetic construct
  modified_base 1: mod_base = um
  modified_base 1^2: mod_base = OTHER; note = phosphorothioate linkage
  modified_base 2: mod_base = OTHER; note = 2'-fluorouridine
  modified_base 2^3: mod_base = OTHER; note = phosphorothioate linkage
  modified_base 3: mod_base = OTHER; note = 2'-O-methyladenosine
  modified_base 3^4: mod_base = OTHER; note = phosphorothioate linkage
  modified_base 4: mod_base = gm
  modified_base 5: mod_base = um
  modified_base 6: mod_base = OTHER; note = 2'-O-methyladenosine
  modified_base 7: mod_base = gm
  modified_base 8: mod_base = gm
  modified_base 9: mod_base = um
  modified_base 10: mod_base = OTHER; note = 2'-O-methyladenosine
  modified_base 11: mod_base = um
  modified_base 12: mod_base = OTHER; note = 2'-fluoroadenosine
  modified_base 13: mod_base = OTHER; note = 2'-O-methyladenosine
  modified_base 14: mod_base = OTHER; note = 2'-fluorocytidine
  modified_base 15: mod_base = cm
  modified_base 16: mod_base = OTHER; note = 2'-fluoroadenosine
  modified_base 17: mod_base = cm
  modified_base 18: mod_base = OTHER; note = 2'-O-methyladenosine
  modified_base 19: mod_base = gm
  modified_base 20: mod_base = cm
  modified_base 20^21: mod_base = OTHER; note = phosphorothioate linkage
  modified_base 21: mod_base = OTHER; note = 2'-O-methyladenosine
  source 1..21: mol_type = other RNA
ttagtaggtataaccacagca

SEQ ID NO: 739 - RNA, 21 nt, synthetic construct
  modified_base 1: mod_base = OTHER; note = 2'-O-methyladenosine
  modified_base 1^2: mod_base = OTHER; note = phosphorothioate linkage
  modified_base 2: mod_base = OTHER; note = 2'-fluoroadenosine
  modified_base 2^3: mod_base = OTHER; note = phosphorothioate linkage
  modified_base 3: mod_base = OTHER; note = 2'-O-methyladenosine
  modified_base 3^4: mod_base = OTHER; note = phosphorothioate linkage
  modified_base 4: mod_base = OTHER; note = 2'-fluoroguanosine
  modified_base 5: mod_base = OTHER; note = 2'-O-methyladenosine
  modified_base 6: mod_base = OTHER; note = 2'-O-methyladenosine
  modified_base 7: mod_base = gm
  modified_base 8: mod_base = um
  modified_base 9: mod_base = gm
  modified_base 10: mod_base = um
  modified_base 11: mod_base = cm
  modified_base 12: mod_base = OTHER; note = 2'-fluorouridine
  modified_base 13: mod_base = um
  modified_base 14: mod_base = OTHER; note = 2'-fluoroadenosine
  modified_base 15: mod_base = OTHER; note = 2'-O-methyladenosine
  modified_base 16: mod_base = OTHER; note = 2'-fluoroguanosine
  modified_base 17: mod_base = OTHER; note = 2'-O-methyladenosine
  modified_base 18: mod_base = um
  modified_base 19: mod_base = um
  modified_base 20: mod_base = gm
  modified_base 20^21: mod_base = OTHER; note = phosphorothioate linkage
  modified_base 21: mod_base = cm
  source 1..21: mol_type = other RNA
aaagaagtgtcttaagattgc

SEQ ID NO: 740 - RNA, 21 nt, synthetic construct
  modified_base 1: mod_base = um
  modified_base 1^2: mod_base = OTHER; note = phosphorothioate linkage
  modified_base 2: mod_base = OTHER; note = 2'-fluorocytidine
  modified_base 2^3: mod_base = OTHER; note = phosphorothioate linkage
  modified_base 3: mod_base = gm
  modified_base 3^4: mod_base = OTHER; note = phosphorothioate linkage
  modified_base 4: mod_base = um
  modified_base 5: mod_base = cm
  modified_base 6: mod_base = OTHER; note = 2'-O-methyladenosine
  modified_base 7: mod_base = OTHER; note = 2'-O-methyladenosine
  modified_base 8: mod_base = OTHER; note = 2'-fluorouridine
  modified_base 9: mod_base = OTHER; note = 2'-fluoroadenosine
  modified_base 10: mod_base = um
  modified_base 11: mod_base = gm
  modified_base 12: mod_base = OTHER; note = 2'-fluorocytidine
  modified_base 13: mod_base = um
  modified_base 14: mod_base = OTHER; note = 2'-fluorouridine
  modified_base 15: mod_base = OTHER; note = 2'-O-methyladenosine
  modified_base 16: mod_base = OTHER; note = 2'-fluorouridine
  modified_base 17: mod_base = um
  modified_base 18: mod_base = cm
  modified_base 19: mod_base = OTHER; note = 2'-O-methyladenosine
  modified_base 20: mod_base = gm
  modified_base 20^21: mod_base = OTHER; note = phosphorothioate linkage
  modified_base 21: mod_base = cm
  source 1..21: mol_type = other RNA
tcgtcaatatgcttattcagc

SEQ ID NO: 741 - RNA, 21 nt, synthetic construct
  modified_base 1: mod_base = um
  modified_base 1^2: mod_base = OTHER; note = phosphorothioate linkage
  modified_base 2: mod_base = OTHER; note = 2'-fluorouridine
  modified_base 2^3: mod_base = OTHER; note = phosphorothioate linkage
  modified_base 3: mod_base = cm
  modified_base 3^4: mod_base = OTHER; note = phosphorothioate linkage
  modified_base 4: mod_base = OTHER; note = 2'-fluoroadenosine
  modified_base 5: mod_base = um
  modified_base 6: mod_base = OTHER; note = 2'-fluoroadenosine
  modified_base 7: mod_base = OTHER; note = 2'-O-methyladenosine
  modified_base 8: mod_base = OTHER; note = 2'-fluoroguanosine
  modified_base 9: mod_base = cm
  modified_base 10: mod_base = OTHER; note = 2'-fluoroadenosine
  modified_base 11: mod_base = cm
  modified_base 12: mod_base = OTHER; note = 2'-fluorouridine
  modified_base 13: mod_base = cm
  modified_base 14: mod_base = OTHER; note = 2'-fluorouridine
  modified_base 15: mod_base = um
  modified_base 16: mod_base = OTHER; note = 2'-fluoroadenosine
  modified_base 17: mod_base = OTHER; note = 2'-O-methyladenosine
  modified_base 18: mod_base = OTHER; note = 2'-fluoroguanosine
  modified_base 19: mod_base = OTHER; note = 2'-O-methyladenosine
  modified_base 20: mod_base = OTHER; note = 2'-fluoroadenosine
  modified_base 20^21: mod_base = OTHER; note = phosphorothioate linkage
  modified_base 21: mod_base = gm
  source 1..21: mol_type = other RNA
ttcataagcactcttaagaag

SEQ ID NO: 742 - RNA, 21 nt, synthetic construct
  modified_base 1: mod_base = OTHER; note = 5 -cyclopropyl phosphonate-2 -O-methyluridine
  modified_base 1^2: mod_base = OTHER; note = phosphorothioate linkage
  modified_base 2: mod_base = OTHER; note = 2'-fluorocytidine
  modified_base 2^3: mod_base = OTHER; note = phosphorothioate linkage
  modified_base 3: mod_base = um
  modified_base 3^4: mod_base = OTHER; note = phosphorothioate linkage
  modified_base 4: mod_base = OTHER; note = 2'-fluorouridine
  modified_base 5: mod_base = OTHER; note = 2'-O-methyladenosine
  modified_base 6: mod_base = OTHER; note = 2'-fluoroadenosine
  modified_base 7: mod_base = gm
  modified_base 8: mod_base = OTHER; note = 2'-fluoroadenosine
  modified_base 9: mod_base = um
  modified_base 10: mod_base = OTHER; note = 2'-fluorouridine
  modified_base 11: mod_base = gm
  modified_base 12: mod_base = OTHER; note = 2'-fluorouridine
  modified_base 13: mod_base = cm
  modified_base 14: mod_base = OTHER; note = 2'-fluoroadenosine
  modified_base 15: mod_base = OTHER; note = 2'-O-methyladenosine
  modified_base 16: mod_base = OTHER; note = 2'-fluoroadenosine
  modified_base 17: mod_base = gm
  modified_base 18: mod_base = OTHER; note = 2'-fluoroguanosine
  modified_base 19: mod_base = um
  modified_base 20: mod_base = OTHER; note = 2'-fluoroguanosine
  modified_base 20^21: mod_base = OTHER; note = phosphorothioate linkage
  modified_base 21: mod_base = cm
  source 1..21: mol_type = other RNA
tcttaagattgtcaaaggtgc

SEQ ID NO: 743 - RNA, 21 nt, synthetic construct
  modified_base 1: mod_base = OTHER; note = 5 -cyclopropyl phosphonate-2 -O-methyluridine
  modified_base 1^2: mod_base = OTHER; note = phosphorothioate linkage
  modified_base 2: mod_base = OTHER; note = 2'-fluorouridine
  modified_base 2^3: mod_base = OTHER; note = phosphorothioate linkage
  modified_base 3: mod_base = OTHER; note = 2'-O-methyladenosine
  modified_base 3^4: mod_base = OTHER; note = phosphorothioate linkage
  modified_base 4: mod_base = OTHER; note = 2'-fluoroguanosine
  modified_base 5: mod_base = gm
  modified_base 6: mod_base = OTHER; note = 2'-fluoroadenosine
  modified_base 7: mod_base = um
  modified_base 8: mod_base = OTHER; note = 2'-fluorouridine
  modified_base 9: mod_base = um
  modified_base 10: mod_base = OTHER; note = 2'-fluorouridine
  modified_base 11: mod_base = cm
  modified_base 12: mod_base = OTHER; note = 2'-fluorocytidine
  modified_base 13: mod_base = OTHER; note = 2'-O-methyladenosine
  modified_base 14: mod_base = OTHER; note = 2'-fluorocytidine
  modified_base 15: mod_base = um
  modified_base 16: mod_base = OTHER; note = 2'-fluoroadenosine
  modified_base 17: mod_base = cm
  modified_base 18: mod_base = OTHER; note = 2'-fluorouridine
  modified_base 19: mod_base = um
  modified_base 20: mod_base = OTHER; note = 2'-fluorocytidine
  modified_base 20^21: mod_base = OTHER; note = phosphorothioate linkage
  modified_base 21: mod_base = cm
  source 1..21: mol_type = other RNA
ttaggattttccactacttcc

SEQ ID NO: 744 - RNA, 21 nt, synthetic construct
  modified_base 1: mod_base = OTHER; note = 5 -cyclopropyl phosphonate-2 -O-methyluridine
  modified_base 1^2: mod_base = OTHER; note = phosphorothioate linkage
  modified_base 2: mod_base = OTHER; note = 2'-fluorouridine
  modified_base 2^3: mod_base = OTHER; note = phosphorothioate linkage
  modified_base 3: mod_base = OTHER; note = 2'-O-methyladenosine
  modified_base 3^4: mod_base = OTHER; note = phosphorothioate linkage
  modified_base 4: mod_base = OTHER; note = 2'-fluoroguanosine
  modified_base 5: mod_base = OTHER; note = 2'-O-methyladenosine
  modified_base 6: mod_base = OTHER; note = 2'-fluorouridine
  modified_base 7: mod_base = OTHER; note = 2'-O-methyladenosine
  modified_base 8: mod_base = OTHER; note = 2'-fluoroadenosine
  modified_base 9: mod_base = gm
  modified_base 10: mod_base = OTHER; note = 2'-fluoroadenosine
  modified_base 11: mod_base = cm
  modified_base 12: mod_base = OTHER; note = 2'-fluoroadenosine
  modified_base 13: mod_base = um
  modified_base 14: mod_base = OTHER; note = 2'-fluorouridine
  modified_base 15: mod_base = gm
  modified_base 16: mod_base = OTHER; note = 2'-fluorouridine
  modified_base 17: mod_base = cm
  modified_base 18: mod_base = OTHER; note = 2'-fluorouridine
  modified_base 19: mod_base = OTHER; note = 2'-O-methyladenosine
  modified_base 20: mod_base = OTHER; note = 2'-fluoroadenosine
  modified_base 20^21: mod_base = OTHER; note = phosphorothioate linkage
  modified_base 21: mod_base = gm
  source 1..21: mol_type = other RNA
ttagataagacattgtctaag

SEQ ID NO: 745 - RNA, 21 nt, synthetic construct
  modified_base 1: mod_base = OTHER; note = 5 -cyclopropyl phosphonate-2 -O-methyluridine
  modified_base 1^2: mod_base = OTHER; note = phosphorothioate linkage
  modified_base 2: mod_base = OTHER; note = 2'-fluoroguanosine
  modified_base 2^3: mod_base = OTHER; note = phosphorothioate linkage
  modified_base 3: mod_base = um
  modified_base 3^4: mod_base = OTHER; note = phosphorothioate linkage
  modified_base 4: mod_base = OTHER; note = 2'-fluoroadenosine
  modified_base 5: mod_base = gm
  modified_base 6: mod_base = OTHER; note = 2'-fluorouridine
  modified_base 7: mod_base = OTHER; note = 2'-O-methyladenosine
  modified_base 8: mod_base = OTHER; note = 2'-fluoroguanosine
  modified_base 9: mod_base = OTHER; note = 2'-O-methyladenosine
  modified_base 10: mod_base = OTHER; note = 2'-fluoroadenosine
  modified_base 11: mod_base = OTHER; note = 2'-O-methyladenosine
  modified_base 12: mod_base = OTHER; note = 2'-fluorouridine
  modified_base 13: mod_base = OTHER; note = 2'-O-methyladenosine
  modified_base 14: mod_base = OTHER; note = 2'-fluorocytidine
  modified_base 15: mod_base = cm
  modified_base 16: mod_base = OTHER; note = 2'-fluoroadenosine
  modified_base 17: mod_base = um
  modified_base 18: mod_base = OTHER; note = 2'-fluorocytidine
  modified_base 19: mod_base = um
  modified_base 20: mod_base = OTHER; note = 2'-fluorouridine
  modified_base 20^21: mod_base = OTHER; note = phosphorothioate linkage
  modified_base 21: mod_base = gm
  source 1..21: mol_type = other RNA
tgtagtagaaataccatcttg

SEQ ID NO: 746 - RNA, 21 nt, synthetic construct
  modified_base 1: mod_base = OTHER; note = 5 -cyclopropyl phosphonate-2 -O-methyluridine
  modified_base 1^2: mod_base = OTHER; note = phosphorothioate linkage
  modified_base 2: mod_base = OTHER; note = 2'-fluorouridine
  modified_base 2^3: mod_base = OTHER; note = phosphorothioate linkage
  modified_base 3: mod_base = um
  modified_base 3^4: mod_base = OTHER; note = phosphorothioate linkage
  modified_base 4: mod_base = OTHER; note = 2'-fluoroguanosine
  modified_base 5: mod_base = um
  modified_base 6: mod_base = OTHER; note = 2'-fluoroadenosine
  modified_base 7: mod_base = OTHER; note = 2'-O-methyladenosine
  modified_base 8: mod_base = OTHER; note = 2'-fluorouridine
  modified_base 9: mod_base = cm
  modified_base 10: mod_base = OTHER; note = 2'-fluoroadenosine
  modified_base 11: mod_base = gm
  modified_base 12: mod_base = OTHER; note = 2'-fluorouridine
  modified_base 13: mod_base = um
  modified_base 14: mod_base = OTHER; note = 2'-fluorocytidine
  modified_base 15: mod_base = cm
  modified_base 16: mod_base = OTHER; note = 2'-fluorouridine
  modified_base 17: mod_base = um
  modified_base 18: mod_base = OTHER; note = 2'-fluoroguanosine
  modified_base 19: mod_base = um
  modified_base 20: mod_base = OTHER; note = 2'-fluorocytidine
  modified_base 20^21: mod_base = OTHER; note = phosphorothioate linkage
  modified_base 21: mod_base = cm
  source 1..21: mol_type = other RNA
tttgtaatcagttccttgtcc

SEQ ID NO: 747 - RNA, 21 nt, synthetic construct
  modified_base 1: mod_base = OTHER; note = 5 -cyclopropyl phosphonate-2 -O-methyluridine
  modified_base 1^2: mod_base = OTHER; note = phosphorothioate linkage
  modified_base 2: mod_base = OTHER; note = 2'-fluorouridine
  modified_base 2^3: mod_base = OTHER; note = phosphorothioate linkage
  modified_base 3: mod_base = OTHER; note = 2'-O-methyladenosine
  modified_base 3^4: mod_base = OTHER; note = phosphorothioate linkage
  modified_base 4: mod_base = OTHER; note = 2'-fluorocytidine
  modified_base 5: mod_base = OTHER; note = 2'-O-methyladenosine
  modified_base 6: mod_base = OTHER; note = 2'-fluorouridine
  modified_base 7: mod_base = um
  modified_base 8: mod_base = OTHER; note = 2'-fluoroguanosine
  modified_base 9: mod_base = um
  modified_base 10: mod_base = OTHER; note = 2'-fluoroadenosine
  modified_base 11: mod_base = um
  modified_base 12: mod_base = OTHER; note = 2'-fluoroguanosine
  modified_base 13: mod_base = cm
  modified_base 14: mod_base = OTHER; note = 2'-fluorouridine
  modified_base 15: mod_base = um
  modified_base 16: mod_base = OTHER; note = 2'-fluorouridine
  modified_base 17: mod_base = OTHER; note = 2'-O-methyladenosine
  modified_base 18: mod_base = OTHER; note = 2'-fluoroguanosine
  modified_base 19: mod_base = um
  modified_base 20: mod_base = OTHER; note = 2'-fluoroguanosine
  modified_base 20^21: mod_base = OTHER; note = phosphorothioate linkage
  modified_base 21: mod_base = gm
  source 1..21: mol_type = other RNA
ttacattgtatgctttagtgg

SEQ ID NO: 748 - RNA, 21 nt, synthetic construct
  modified_base 1: mod_base = OTHER; note = 5 -cyclopropyl phosphonate-2 -O-methyluridine
  modified_base 1^2: mod_base = OTHER; note = phosphorothioate linkage
  modified_base 2: mod_base = OTHER; note = 2'-fluorouridine
  modified_base 2^3: mod_base = OTHER; note = phosphorothioate linkage
  modified_base 3: mod_base = gm
  modified_base 3^4: mod_base = OTHER; note = phosphorothioate linkage
  modified_base 4: mod_base = OTHER; note = 2'-fluorouridine
  modified_base 5: mod_base = um
  modified_base 6: mod_base = OTHER; note = 2'-fluorouridine
  modified_base 7: mod_base = OTHER; note = 2'-O-methyladenosine
  modified_base 8: mod_base = OTHER; note = 2'-fluoroadenosine
  modified_base 9: mod_base = cm
  modified_base 10: mod_base = OTHER; note = 2'-fluorouridine
  modified_base 11: mod_base = OTHER; note = 2'-O-methyladenosine
  modified_base 12: mod_base = OTHER; note = 2'-fluoroguanosine
  modified_base 13: mod_base = cm
  modified_base 14: mod_base = OTHER; note = 2'-fluoroadenosine
  modified_base 15: mod_base = um
  modified_base 16: mod_base = OTHER; note = 2'-fluorouridine
  modified_base 17: mod_base = gm
  modified_base 18: mod_base = OTHER; note = 2'-fluorouridine
  modified_base 19: mod_base = OTHER; note = 2'-O-methyladenosine
  modified_base 20: mod_base = OTHER; note = 2'-fluorouridine
  modified_base 20^21: mod_base = OTHER; note = phosphorothioate linkage
  modified_base 21: mod_base = gm
  source 1..21: mol_type = other RNA
ttgtttaactagcattgtatg

SEQ ID NO: 749 - RNA, 21 nt, synthetic construct
  modified_base 1: mod_base = OTHER; note = 5 -cyclopropyl phosphonate-2 -O-methyladenosine
  modified_base 1^2: mod_base = OTHER; note = phosphorothioate linkage
  modified_base 2: mod_base = OTHER; note = 2'-fluoroguanosine
  modified_base 2^3: mod_base = OTHER; note = phosphorothioate linkage
  modified_base 3: mod_base = um
  modified_base 3^4: mod_base = OTHER; note = phosphorothioate linkage
  modified_base 4: mod_base = OTHER; note = 2'-fluoroadenosine
  modified_base 5: mod_base = gm
  modified_base 6: mod_base = OTHER; note = 2'-fluoroadenosine
  modified_base 7: mod_base = OTHER; note = 2'-O-methyladenosine
  modified_base 8: mod_base = OTHER; note = 2'-fluoroadenosine
  modified_base 9: mod_base = um
  modified_base 10: mod_base = OTHER; note = 2'-fluoroadenosine
  modified_base 11: mod_base = cm
  modified_base 12: mod_base = OTHER; note = 2'-fluorocytidine
  modified_base 13: mod_base = OTHER; note = 2'-O-methyladenosine
  modified_base 14: mod_base = OTHER; note = 2'-fluorouridine
  modified_base 15: mod_base = cm
  modified_base 16: mod_base = OTHER; note = 2'-fluorouridine
  modified_base 17: mod_base = um
  modified_base 18: mod_base = OTHER; note = 2'-fluoroguanosine
  modified_base 19: mod_base = gm
  modified_base 20: mod_base = OTHER; note = 2'-fluoroadenosine
  modified_base 20^21: mod_base = OTHER; note = phosphorothioate linkage
  modified_base 21: mod_base = cm
  source 1..21: mol_type = other RNA
agtagaaataccatcttggac

SEQ ID NO: 750 - RNA, 21 nt, synthetic construct
  modified_base 1: mod_base = OTHER; note = 5 -cyclopropyl phosphonate-2 -O-methyluridine
  modified_base 1^2: mod_base = OTHER; note = phosphorothioate linkage
  modified_base 2: mod_base = OTHER; note = 2'-fluoroguanosine
  modified_base 2^3: mod_base = OTHER; note = phosphorothioate linkage
  modified_base 3: mod_base = um
  modified_base 3^4: mod_base = OTHER; note = phosphorothioate linkage
  modified_base 4: mod_base = OTHER; note = 2'-fluoroadenosine
  modified_base 5: mod_base = gm
  modified_base 6: mod_base = OTHER; note = 2'-fluoroadenosine
  modified_base 7: mod_base = OTHER; note = 2'-O-methyladenosine
  modified_base 8: mod_base = OTHER; note = 2'-fluoroadenosine
  modified_base 9: mod_base = um
  modified_base 10: mod_base = OTHER; note = 2'-fluoroadenosine
  modified_base 11: mod_base = cm
  modified_base 12: mod_base = OTHER; note = 2'-fluorocytidine
  modified_base 13: mod_base = OTHER; note = 2'-O-methyladenosine
  modified_base 14: mod_base = OTHER; note = 2'-fluorouridine
  modified_base 15: mod_base = cm
  modified_base 16: mod_base = OTHER; note = 2'-fluorouridine
  modified_base 17: mod_base = um
  modified_base 18: mod_base = OTHER; note = 2'-fluoroguanosine
  modified_base 19: mod_base = gm
  modified_base 20: mod_base = OTHER; note = 2'-fluoroadenosine
  modified_base 20^21: mod_base = OTHER; note = phosphorothioate linkage
  modified_base 21: mod_base = cm
  source 1..21: mol_type = other RNA
tgtagaaataccatcttggac

SEQ ID NO: 751 - RNA, 21 nt, synthetic construct
  modified_base 1: mod_base = OTHER; note = 5 -cyclopropyl phosphonate-2 -O-methyluridine
  modified_base 1^2: mod_base = OTHER; note = phosphorothioate linkage
  modified_base 2: mod_base = OTHER; note = 2'-fluorouridine
  modified_base 2^3: mod_base = OTHER; note = phosphorothioate linkage
  modified_base 3: mod_base = OTHER; note = 2'-O-methyladenosine
  modified_base 4: mod_base = OTHER; note = 2'-fluoroguanosine
  modified_base 5: mod_base = gm
  modified_base 6: mod_base = OTHER; note = 2'-O-methyladenosine
  modified_base 7: mod_base = um
  modified_base 8: mod_base = um
  modified_base 9: mod_base = um
  modified_base 10: mod_base = um
  modified_base 11: mod_base = cm
  modified_base 12: mod_base = OTHER; note = 2'-fluorocytidine
  modified_base 13: mod_base = OTHER; note = 2'-O-methyladenosine
  modified_base 14: mod_base = OTHER; note = 2'-fluorocytidine
  modified_base 15: mod_base = um
  modified_base 16: mod_base = OTHER; note = 2'-fluoroadenosine
  modified_base 17: mod_base = cm
  modified_base 18: mod_base = um
  modified_base 19: mod_base = um
  modified_base 19^20: mod_base = OTHER; note = phosphorothioate linkage
  modified_base 20: mod_base = cm
  modified_base 20^21: mod_base = OTHER; note = phosphorothioate linkage
  modified_base 21: mod_base = cm
  source 1..21: mol_type = other RNA
ttaggattttccactacttcc

SEQ ID NO: 752 - RNA, 21 nt, synthetic construct
  modified_base 1: mod_base = OTHER; note = 5 -cyclopropyl phosphonate-2 -O-methyluridine
  modified_base 1^2: mod_base = OTHER; note = phosphorothioate linkage
  modified_base 2: mod_base = OTHER; note = 2'-fluorouridine
  modified_base 2^3: mod_base = OTHER; note = phosphorothioate linkage
  modified_base 3: mod_base = OTHER; note = 2'-O-methyladenosine
  modified_base 4: mod_base = gm
  modified_base 5: mod_base = gm
  modified_base 6: mod_base = OTHER; note = 2'-O-methyladenosine
  modified_base 7: mod_base = OTHER; note = 2'-fluorouridine
  modified_base 8: mod_base = um
  modified_base 9: mod_base = um
  modified_base 10: mod_base = um
  modified_base 11: mod_base = cm
  modified_base 12: mod_base = OTHER; note = 2'-fluorocytidine
  modified_base 13: mod_base = OTHER; note = 2'-O-methyladenosine
  modified_base 14: mod_base = OTHER; note = 2'-fluorocytidine
  modified_base 15: mod_base = um
  modified_base 16: mod_base = OTHER; note = 2'-fluoroadenosine
  modified_base 17: mod_base = cm
  modified_base 18: mod_base = um
  modified_base 19: mod_base = um
  modified_base 19^20: mod_base = OTHER; note = phosphorothioate linkage
  modified_base 20: mod_base = cm
  modified_base 20^21: mod_base = OTHER; note = phosphorothioate linkage
  modified_base 21: mod_base = cm
  source 1..21: mol_type = other RNA
ttaggattttccactacttcc

SEQ ID NO: 753 - RNA, 21 nt, synthetic construct
  modified_base 1: mod_base = OTHER; note = 5 -cyclopropyl phosphonate-2 -O-methyluridine
  modified_base 1^2: mod_base = OTHER; note = phosphorothioate linkage
  modified_base 2: mod_base = OTHER; note = 2'-fluorouridine
  modified_base 2^3: mod_base = OTHER; note = phosphorothioate linkage
  modified_base 3: mod_base = OTHER; note = 2'-O-methyladenosine
  modified_base 4: mod_base = gm
  modified_base 5: mod_base = gm
  modified_base 6: mod_base = OTHER; note = 2'-O-methyladenosine
  modified_base 7: mod_base = um
  modified_base 8: mod_base = um
  modified_base 9: mod_base = OTHER; note = 2'-fluorouridine
  modified_base 10: mod_base = um
  modified_base 11: mod_base = cm
  modified_base 12: mod_base = OTHER; note = 2'-fluorocytidine
  modified_base 13: mod_base = OTHER; note = 2'-O-methyladenosine
  modified_base 14: mod_base = OTHER; note = 2'-fluorocytidine
  modified_base 15: mod_base = um
  modified_base 16: mod_base = OTHER; note = 2'-fluoroadenosine
  modified_base 17: mod_base = cm
  modified_base 18: mod_base = um
  modified_base 19: mod_base = um
  modified_base 19^20: mod_base = OTHER; note = phosphorothioate linkage
  modified_base 20: mod_base = cm
  modified_base 20^21: mod_base = OTHER; note = phosphorothioate linkage
  modified_base 21: mod_base = cm
  source 1..21: mol_type = other RNA
ttaggattttccactacttcc

SEQ ID NO: 754 - RNA, 21 nt, synthetic construct
  modified_base 1: mod_base = OTHER; note = 5 -cyclopropyl phosphonate-2 -O-methyluridine
  modified_base 1^2: mod_base = OTHER; note = phosphorothioate linkage
  modified_base 2: mod_base = OTHER; note = 2'-fluorouridine
  modified_base 2^3: mod_base = OTHER; note = phosphorothioate linkage
  modified_base 3: mod_base = OTHER; note = 2'-O-methyladenosine
  modified_base 4: mod_base = gm
  modified_base 5: mod_base = gm
  modified_base 6: mod_base = OTHER; note = 2'-O-methyladenosine
  modified_base 7: mod_base = um
  modified_base 8: mod_base = um
  modified_base 9: mod_base = OTHER; note = 2'-fluorouridine
  modified_base 10: mod_base = um
  modified_base 11: mod_base = cm
  modified_base 12: mod_base = OTHER; note = 2'-fluorocytidine
  modified_base 13: mod_base = OTHER; note = 2'-O-methyladenosine
  modified_base 14: mod_base = OTHER; note = 2'-fluorocytidine
  modified_base 15: mod_base = um
  modified_base 16: mod_base = OTHER; note = 2'-fluoroadenosine
  modified_base 17: mod_base = cm
  modified_base 18: mod_base = um
  modified_base 19: mod_base = um
  modified_base 19^20: mod_base = OTHER; note = phosphorothioate linkage
  modified_base 20: mod_base = cm
  modified_base 20^21: mod_base = OTHER; note = phosphorothioate linkage
  modified_base 21: mod_base = gm
  source 1..21: mol_type = other RNA
ttaggattttccactacttcg

SEQ ID NO: 755 - RNA, 21 nt, synthetic construct
  modified_base 1: mod_base = OTHER; note = 5 -cyclopropyl phosphonate-2 -O-methyluridine
  modified_base 2: mod_base = OTHER; note = 2'-fluorouridine
  modified_base 3: mod_base = OTHER; note = 2'-O-methyladenosine
  modified_base 4: mod_base = gm
  modified_base 5: mod_base = gm
  modified_base 6: mod_base = OTHER; note = 2'-O-methyladenosine
  modified_base 7: mod_base = um
  modified_base 8: mod_base = um
  modified_base 9: mod_base = OTHER; note = 2'-fluorouridine
  modified_base 10: mod_base = um
  modified_base 11: mod_base = cm
  modified_base 12: mod_base = OTHER; note = 2'-fluorocytidine
  modified_base 13: mod_base = OTHER; note = 2'-O-methyladenosine
  modified_base 14: mod_base = OTHER; note = 2'-fluorocytidine
  modified_base 15: mod_base = um
  modified_base 16: mod_base = OTHER; note = 2'-fluoroadenosine
  modified_base 17: mod_base = cm
  modified_base 18: mod_base = um
  modified_base 19: mod_base = um
  modified_base 19^20: mod_base = OTHER; note = phosphorothioate linkage
  modified_base 20: mod_base = cm
  modified_base 20^21: mod_base = OTHER; note = phosphorothioate linkage
  modified_base 21: mod_base = cm
  source 1..21: mol_type = other RNA
ttaggattttccactacttcc

SEQ ID NO: 756 - RNA, 21 nt, synthetic construct
  modified_base 1: mod_base = OTHER; note = 5 -cyclopropyl phosphonate-2 -O-methyluridine
  modified_base 1^2: mod_base = OTHER; note = phosphorothioate linkage
  modified_base 2: mod_base = OTHER; note = 2'-fluorouridine
  modified_base 2^3: mod_base = OTHER; note = phosphorothioate linkage
  modified_base 3: mod_base = gm
  modified_base 4: mod_base = OTHER; note = 2'-fluorouridine
  modified_base 5: mod_base = um
  modified_base 6: mod_base = um
  modified_base 7: mod_base = OTHER; note = 2'-O-methyladenosine
  modified_base 8: mod_base = OTHER; note = 2'-O-methyladenosine
  modified_base 9: mod_base = cm
  modified_base 10: mod_base = um
  modified_base 11: mod_base = OTHER; note = 2'-O-methyladenosine
  modified_base 12: mod_base = OTHER; note = 2'-fluoroguanosine
  modified_base 13: mod_base = cm
  modified_base 14: mod_base = OTHER; note = 2'-fluoroadenosine
  modified_base 15: mod_base = um
  modified_base 16: mod_base = OTHER; note = 2'-fluorouridine
  modified_base 17: mod_base = gm
  modified_base 18: mod_base = um
  modified_base 19: mod_base = OTHER; note = 2'-O-methyladenosine
  modified_base 19^20: mod_base = OTHER; note = phosphorothioate linkage
  modified_base 20: mod_base = um
  modified_base 20^21: mod_base = OTHER; note = phosphorothioate linkage
  modified_base 21: mod_base = gm
  source 1..21: mol_type = other RNA
ttgtttaactagcattgtatg

SEQ ID NO: 757 - RNA, 21 nt, synthetic construct
  modified_base 1: mod_base = OTHER; note = 5 -cyclopropyl phosphonate-2 -O-methyluridine
  modified_base 2: mod_base = OTHER; note = 2'-fluorouridine
  modified_base 3: mod_base = gm
  modified_base 4: mod_base = OTHER; note = 2'-fluorouridine
  modified_base 5: mod_base = um
  modified_base 6: mod_base = um
  modified_base 7: mod_base = OTHER; note = 2'-O-methyladenosine
  modified_base 8: mod_base = OTHER; note = 2'-O-methyladenosine
  modified_base 9: mod_base = cm
  modified_base 10: mod_base = um
  modified_base 11: mod_base = OTHER; note = 2'-O-methyladenosine
  modified_base 12: mod_base = OTHER; note = 2'-fluoroguanosine
  modified_base 13: mod_base = cm
  modified_base 14: mod_base = OTHER; note = 2'-fluoroadenosine
  modified_base 15: mod_base = um
  modified_base 16: mod_base = OTHER; note = 2'-fluorouridine
  modified_base 17: mod_base = gm
  modified_base 18: mod_base = um
  modified_base 19: mod_base = OTHER; note = 2'-O-methyladenosine
  modified_base 19^20: mod_base = OTHER; note = phosphorothioate linkage
  modified_base 20: mod_base = um
  modified_base 20^21: mod_base = OTHER; note = phosphorothioate linkage
  modified_base 21: mod_base = gm
  source 1..21: mol_type = other RNA
ttgtttaactagcattgtatg

SEQ ID NO: 758 - RNA, 21 nt, synthetic construct
  modified_base 1: mod_base = OTHER; note = 5 -cyclopropyl phosphonate-2 -O-methyluridine
  modified_base 1^2: mod_base = OTHER; note = phosphorothioate linkage
  modified_base 2: mod_base = OTHER; note = 2'-fluorouridine
  modified_base 2^3: mod_base = OTHER; note = phosphorothioate linkage
  modified_base 3: mod_base = gm
  modified_base 4: mod_base = OTHER; note = 2'-fluorouridine
  modified_base 5: mod_base = um
  modified_base 6: mod_base = um
  modified_base 7: mod_base = OTHER; note = 2'-O-methyladenosine
  modified_base 8: mod_base = OTHER; note = 2'-O-methyladenosine
  modified_base 9: mod_base = cm
  modified_base 10: mod_base = um
  modified_base 11: mod_base = OTHER; note = 2'-O-methyladenosine
  modified_base 12: mod_base = OTHER; note = 2'-fluoroguanosine
  modified_base 13: mod_base = cm
  modified_base 14: mod_base = OTHER; note = 2'-fluoroadenosine
  modified_base 15: mod_base = um
  modified_base 16: mod_base = OTHER; note = 2'-fluorouridine
  modified_base 17: mod_base = gm
  modified_base 18: mod_base = um
  modified_base 19: mod_base = OTHER; note = 2'-O-methyladenosine
  modified_base 19^20: mod_base = OTHER; note = phosphorothioate linkage
  modified_base 20: mod_base = cm
  modified_base 20^21: mod_base = OTHER; note = phosphorothioate linkage
  modified_base 21: mod_base = gm
  source 1..21: mol_type = other RNA
ttgtttaactagcattgtacg

SEQ ID NO: 759 - RNA, 21 nt, synthetic construct
  modified_base 1: mod_base = OTHER; note = 5 -cyclopropyl phosphonate-2 -O-methyluridine
  modified_base 1^2: mod_base = OTHER; note = phosphorothioate linkage
  modified_base 2: mod_base = OTHER; note = 2'-fluorouridine
  modified_base 2^3: mod_base = OTHER; note = phosphorothioate linkage
  modified_base 3: mod_base = gm
  modified_base 4: mod_base = um
  modified_base 5: mod_base = um
  modified_base 6: mod_base = um
  modified_base 7: mod_base = OTHER; note = 2'-fluoroadenosine
  modified_base 8: mod_base = OTHER; note = 2'-O-methyladenosine
  modified_base 9: mod_base = cm
  modified_base 10: mod_base = um
  modified_base 11: mod_base = OTHER; note = 2'-O-methyladenosine
  modified_base 12: mod_base = OTHER; note = 2'-fluoroguanosine
  modified_base 13: mod_base = cm
  modified_base 14: mod_base = OTHER; note = 2'-fluoroadenosine
  modified_base 15: mod_base = um
  modified_base 16: mod_base = OTHER; note = 2'-fluorouridine
  modified_base 17: mod_base = gm
  modified_base 18: mod_base = um
  modified_base 19: mod_base = OTHER; note = 2'-O-methyladenosine
  modified_base 19^20: mod_base = OTHER; note = phosphorothioate linkage
  modified_base 20: mod_base = um
  modified_base 20^21: mod_base = OTHER; note = phosphorothioate linkage
  modified_base 21: mod_base = gm
  source 1..21: mol_type = other RNA
ttgtttaactagcattgtatg

SEQ ID NO: 760 - RNA, 21 nt, synthetic construct
  modified_base 1: mod_base = OTHER; note = 5 -cyclopropyl phosphonate-2 -O-methyladenosine
  modified_base 1^2: mod_base = OTHER; note = phosphorothioate linkage
  modified_base 2: mod_base = OTHER; note = 2'-fluoroguanosine
  modified_base 2^3: mod_base = OTHER; note = phosphorothioate linkage
  modified_base 3: mod_base = um
  modified_base 4: mod_base = OTHER; note = 2'-fluoroadenosine
  modified_base 5: mod_base = gm
  modified_base 6: mod_base = OTHER; note = 2'-O-methyladenosine
  modified_base 7: mod_base = OTHER; note = 2'-O-methyladenosine
  modified_base 8: mod_base = OTHER; note = 2'-O-methyladenosine
  modified_base 9: mod_base = um
  modified_base 10: mod_base = OTHER; note = 2'-O-methyladenosine
  modified_base 11: mod_base = cm
  modified_base 12: mod_base = OTHER; note = 2'-fluorocytidine
  modified_base 13: mod_base = OTHER; note = 2'-O-methyladenosine
  modified_base 14: mod_base = OTHER; note = 2'-fluorouridine
  modified_base 15: mod_base = cm
  modified_base 16: mod_base = OTHER; note = 2'-fluorouridine
  modified_base 17: mod_base = um
  modified_base 18: mod_base = gm
  modified_base 19: mod_base = gm
  modified_base 19^20: mod_base = OTHER; note = phosphorothioate linkage
  modified_base 20: mod_base = OTHER; note = 2'-O-methyladenosine
  modified_base 20^21: mod_base = OTHER; note = phosphorothioate linkage
  modified_base 21: mod_base = cm
  source 1..21: mol_type = other RNA
agtagaaataccatcttggac

SEQ ID NO: 761 - RNA, 21 nt, synthetic construct
  modified_base 1: mod_base = OTHER; note = 5 -cyclopropyl phosphonate-2 -O-methyladenosine
  modified_base 1^2: mod_base = OTHER; note = phosphorothioate linkage
  modified_base 2: mod_base = OTHER; note = 2'-fluoroguanosine
  modified_base 2^3: mod_base = OTHER; note = phosphorothioate linkage
  modified_base 3: mod_base = um
  modified_base 4: mod_base = OTHER; note = 2'-O-methyladenosine
  modified_base 5: mod_base = gm
  modified_base 6: mod_base = OTHER; note = 2'-O-methyladenosine
  modified_base 7: mod_base = OTHER; note = 2'-fluoroadenosine
  modified_base 8: mod_base = OTHER; note = 2'-O-methyladenosine
  modified_base 9: mod_base = um
  modified_base 10: mod_base = OTHER; note = 2'-O-methyladenosine
  modified_base 11: mod_base = cm
  modified_base 12: mod_base = OTHER; note = 2'-fluorocytidine
  modified_base 13: mod_base = OTHER; note = 2'-O-methyladenosine
  modified_base 14: mod_base = OTHER; note = 2'-fluorouridine
  modified_base 15: mod_base = cm
  modified_base 16: mod_base = OTHER; note = 2'-fluorouridine
  modified_base 17: mod_base = um
  modified_base 18: mod_base = gm
  modified_base 19: mod_base = gm
  modified_base 19^20: mod_base = OTHER; note = phosphorothioate linkage
  modified_base 20: mod_base = OTHER; note = 2'-O-methyladenosine
  modified_base 20^21: mod_base = OTHER; note = phosphorothioate linkage
  modified_base 21: mod_base = cm
  source 1..21: mol_type = other RNA
agtagaaataccatcttggac

SEQ ID NO: 762 - RNA, 21 nt, synthetic construct
  modified_base 1: mod_base = OTHER; note = 5 -cyclopropyl phosphonate-2 -O-methyladenosine
  modified_base 1^2: mod_base = OTHER; note = phosphorothioate linkage
  modified_base 2: mod_base = OTHER; note = 2'-fluoroguanosine
  modified_base 2^3: mod_base = OTHER; note = phosphorothioate linkage
  modified_base 3: mod_base = um
  modified_base 4: mod_base = OTHER; note = 2'-O-methyladenosine
  modified_base 5: mod_base = gm
  modified_base 6: mod_base = OTHER; note = 2'-O-methyladenosine
  modified_base 7: mod_base = OTHER; note = 2'-O-methyladenosine
  modified_base 8: mod_base = OTHER; note = 2'-O-methyladenosine
  modified_base 9: mod_base = OTHER; note = 2'-fluorouridine
  modified_base 10: mod_base = OTHER; note = 2'-O-methyladenosine
  modified_base 11: mod_base = cm
  modified_base 12: mod_base = OTHER; note = 2'-fluorocytidine
  modified_base 13: mod_base = OTHER; note = 2'-O-methyladenosine
  modified_base 14: mod_base = OTHER; note = 2'-fluorouridine
  modified_base 15: mod_base = cm
  modified_base 16: mod_base = OTHER; note = 2'-fluorouridine
  modified_base 17: mod_base = um
  modified_base 18: mod_base = gm
  modified_base 19: mod_base = gm
  modified_base 19^20: mod_base = OTHER; note = phosphorothioate linkage
  modified_base 20: mod_base = OTHER; note = 2'-O-methyladenosine
  modified_base 20^21: mod_base = OTHER; note = phosphorothioate linkage
  modified_base 21: mod_base = cm
  source 1..21: mol_type = other RNA
agtagaaataccatcttggac

SEQ ID NO: 763 - RNA, 21 nt, synthetic construct
  modified_base 1: mod_base = OTHER; note = 5 -cyclopropyl phosphonate-2 -O-methyladenosine
  modified_base 2: mod_base = OTHER; note = 2'-fluoroguanosine
  modified_base 3: mod_base = um
  modified_base 4: mod_base = OTHER; note = 2'-O-methyladenosine
  modified_base 5: mod_base = gm
  modified_base 6: mod_base = OTHER; note = 2'-O-methyladenosine
  modified_base 7: mod_base = OTHER; note = 2'-O-methyladenosine
  modified_base 8: mod_base = OTHER; note = 2'-O-methyladenosine
  modified_base 9: mod_base = OTHER; note = 2'-fluorouridine
  modified_base 10: mod_base = OTHER; note = 2'-O-methyladenosine
  modified_base 11: mod_base = cm
  modified_base 12: mod_base = OTHER; note = 2'-fluorocytidine
  modified_base 13: mod_base = OTHER; note = 2'-O-methyladenosine
  modified_base 14: mod_base = OTHER; note = 2'-fluorouridine
  modified_base 15: mod_base = cm
  modified_base 16: mod_base = OTHER; note = 2'-fluorouridine
  modified_base 17: mod_base = um
  modified_base 18: mod_base = gm
  modified_base 19: mod_base = gm
  modified_base 19^20: mod_base = OTHER; note = phosphorothioate linkage
  modified_base 20: mod_base = OTHER; note = 2'-O-methyladenosine
  modified_base 20^21: mod_base = OTHER; note = phosphorothioate linkage
  modified_base 21: mod_base = cm
  source 1..21: mol_type = other RNA
agtagaaataccatcttggac

SEQ ID NO: 764 - RNA, 21 nt, synthetic construct
  modified_base 1: mod_base = OTHER; note = 5 -cyclopropyl phosphonate-2 -O-methyluridine
  modified_base 1^2: mod_base = OTHER; note = phosphorothioate linkage
  modified_base 2: mod_base = OTHER; note = 2'-fluoroguanosine
  modified_base 2^3: mod_base = OTHER; note = phosphorothioate linkage
  modified_base 3: mod_base = um
  modified_base 4: mod_base = OTHER; note = 2'-O-methyladenosine
  modified_base 5: mod_base = gm
  modified_base 6: mod_base = OTHER; note = 2'-O-methyladenosine
  modified_base 7: mod_base = OTHER; note = 2'-O-methyladenosine
  modified_base 8: mod_base = OTHER; note = 2'-O-methyladenosine
  modified_base 9: mod_base = OTHER; note = 2'-fluorouridine
  modified_base 10: mod_base = OTHER; note = 2'-O-methyladenosine
  modified_base 11: mod_base = cm
  modified_base 12: mod_base = OTHER; note = 2'-fluorocytidine
  modified_base 13: mod_base = OTHER; note = 2'-O-methyladenosine
  modified_base 14: mod_base = OTHER; note = 2'-fluorouridine
  modified_base 15: mod_base = cm
  modified_base 16: mod_base = OTHER; note = 2'-fluorouridine
  modified_base 17: mod_base = um
  modified_base 18: mod_base = gm
  modified_base 19: mod_base = gm
  modified_base 19^20: mod_base = OTHER; note = phosphorothioate linkage
  modified_base 20: mod_base = OTHER; note = 2'-O-methyladenosine
  modified_base 20^21: mod_base = OTHER; note = phosphorothioate linkage
  modified_base 21: mod_base = cm
  source 1..21: mol_type = other RNA
tgtagaaataccatcttggac

SEQ ID NO: 765 - RNA, 21 nt, synthetic construct
  modified_base 1: mod_base = OTHER; note = 5 -cyclopropyl phosphonate-2 -O-methyluridine
  modified_base 1^2: mod_base = OTHER; note = phosphorothioate linkage
  modified_base 2: mod_base = OTHER; note = 2'-fluorouridine
  modified_base 2^3: mod_base = OTHER; note = phosphorothioate linkage
  modified_base 3: mod_base = um
  modified_base 3^4: mod_base = OTHER; note = phosphorothioate linkage
  modified_base 4: mod_base = OTHER; note = 2'-fluoroguanosine
  modified_base 5: mod_base = um
  modified_base 6: mod_base = OTHER; note = 2'-O-methyladenosine
  modified_base 7: mod_base = OTHER; note = 2'-O-methyladenosine
  modified_base 8: mod_base = um
  modified_base 9: mod_base = cm
  modified_base 10: mod_base = OTHER; note = 2'-O-methyladenosine
  modified_base 11: mod_base = gm
  modified_base 12: mod_base = OTHER; note = 2'-fluorouridine
  modified_base 13: mod_base = um
  modified_base 14: mod_base = OTHER; note = 2'-fluorocytidine
  modified_base 15: mod_base = cm
  modified_base 16: mod_base = OTHER; note = 2'-fluorouridine
  modified_base 17: mod_base = um
  modified_base 18: mod_base = gm
  modified_base 19: mod_base = um
  modified_base 20: mod_base = cm
  modified_base 20^21: mod_base = OTHER; note = phosphorothioate linkage
  modified_base 21: mod_base = cm
  source 1..21: mol_type = other RNA
tttgtaatcagttccttgtcc

SEQ ID NO: 766 - RNA, 21 nt, synthetic construct
  modified_base 1: mod_base = OTHER; note = 5 -cyclopropyl phosphonate-2 -O-methyluridine
  modified_base 1^2: mod_base = OTHER; note = phosphorothioate linkage
  modified_base 2: mod_base = OTHER; note = 2'-fluorouridine
  modified_base 2^3: mod_base = OTHER; note = phosphorothioate linkage
  modified_base 3: mod_base = um
  modified_base 3^4: mod_base = OTHER; note = phosphorothioate linkage
  modified_base 4: mod_base = OTHER; note = 2'-fluoroguanosine
  modified_base 5: mod_base = um
  modified_base 6: mod_base = OTHER; note = 2'-O-methyladenosine
  modified_base 7: mod_base = OTHER; note = 2'-O-methyladenosine
  modified_base 8: mod_base = OTHER; note = 2'-fluorouridine
  modified_base 9: mod_base = OTHER; note = 2'-fluorocytidine
  modified_base 10: mod_base = OTHER; note = 2'-O-methyladenosine
  modified_base 11: mod_base = gm
  modified_base 12: mod_base = OTHER; note = 2'-fluorouridine
  modified_base 13: mod_base = um
  modified_base 14: mod_base = OTHER; note = 2'-fluorocytidine
  modified_base 15: mod_base = cm
  modified_base 16: mod_base = OTHER; note = 2'-fluorouridine
  modified_base 17: mod_base = um
  modified_base 18: mod_base = gm
  modified_base 19: mod_base = um
  modified_base 20: mod_base = cm
  modified_base 20^21: mod_base = OTHER; note = phosphorothioate linkage
  modified_base 21: mod_base = cm
  source 1..21: mol_type = other RNA
tttgtaatcagttccttgtcc

SEQ ID NO: 767 - RNA, 21 nt, synthetic construct
  modified_base 1: mod_base = OTHER; note = 5 -cyclopropyl phosphonate-2 -O-methyluridine
  modified_base 1^2: mod_base = OTHER; note = phosphorothioate linkage
  modified_base 2: mod_base = OTHER; note = 2'-fluorouridine
  modified_base 2^3: mod_base = OTHER; note = phosphorothioate linkage
  modified_base 3: mod_base = um
  modified_base 4: mod_base = OTHER; note = 2'-fluoroguanosine
  modified_base 5: mod_base = um
  modified_base 6: mod_base = OTHER; note = 2'-O-methyladenosine
  modified_base 7: mod_base = OTHER; note = 2'-O-methyladenosine
  modified_base 8: mod_base = um
  modified_base 9: mod_base = cm
  modified_base 10: mod_base = OTHER; note = 2'-O-methyladenosine
  modified_base 11: mod_base = gm
  modified_base 12: mod_base = OTHER; note = 2'-fluorouridine
  modified_base 13: mod_base = um
  modified_base 14: mod_base = OTHER; note = 2'-fluorocytidine
  modified_base 15: mod_base = cm
  modified_base 16: mod_base = OTHER; note = 2'-fluorouridine
  modified_base 17: mod_base = um
  modified_base 18: mod_base = gm
  modified_base 19: mod_base = um
  modified_base 19^20: mod_base = OTHER; note = phosphorothioate linkage
  modified_base 20: mod_base = cm
  modified_base 20^21: mod_base = OTHER; note = phosphorothioate linkage
  modified_base 21: mod_base = cm
  source 1..21: mol_type = other RNA
tttgtaatcagttccttgtcc

SEQ ID NO: 768 - RNA, 21 nt, synthetic construct
  modified_base 1: mod_base = OTHER; note = 5 -cyclopropyl phosphonate-2 -O-methyluridine
  modified_base 2: mod_base = OTHER; note = 2'-fluorouridine
  modified_base 3: mod_base = um
  modified_base 4: mod_base = OTHER; note = 2'-fluoroguanosine
  modified_base 5: mod_base = um
  modified_base 6: mod_base = OTHER; note = 2'-O-methyladenosine
  modified_base 7: mod_base = OTHER; note = 2'-O-methyladenosine
  modified_base 8: mod_base = um
  modified_base 9: mod_base = cm
  modified_base 10: mod_base = OTHER; note = 2'-O-methyladenosine
  modified_base 11: mod_base = gm
  modified_base 12: mod_base = OTHER; note = 2'-fluorouridine
  modified_base 13: mod_base = um
  modified_base 14: mod_base = OTHER; note = 2'-fluorocytidine
  modified_base 15: mod_base = cm
  modified_base 16: mod_base = OTHER; note = 2'-fluorouridine
  modified_base 17: mod_base = um
  modified_base 18: mod_base = gm
  modified_base 19: mod_base = um
  modified_base 19^20: mod_base = OTHER; note = phosphorothioate linkage
  modified_base 20: mod_base = cm
  modified_base 20^21: mod_base = OTHER; note = phosphorothioate linkage
  modified_base 21: mod_base = cm
  source 1..21: mol_type = other RNA
tttgtaatcagttccttgtcc

SEQ ID NO: 769 - RNA, 21 nt, synthetic construct
  modified_base 1: mod_base = OTHER; note = 5 -cyclopropyl phosphonate-2 -O-methyluridine
  modified_base 1^2: mod_base = OTHER; note = phosphorothioate linkage
  modified_base 2: mod_base = OTHER; note = 2'-fluorouridine
  modified_base 2^3: mod_base = OTHER; note = phosphorothioate linkage
  modified_base 3: mod_base = um
  modified_base 3^4: mod_base = OTHER; note = phosphorothioate linkage
  modified_base 4: mod_base = OTHER; note = 2'-fluoroguanosine
  modified_base 5: mod_base = um
  modified_base 6: mod_base = OTHER; note = 2'-O-methyladenosine
  modified_base 7: mod_base = OTHER; note = 2'-O-methyladenosine
  modified_base 8: mod_base = um
  modified_base 9: mod_base = cm
  modified_base 10: mod_base = OTHER; note = 2'-O-methyladenosine
  modified_base 11: mod_base = gm
  modified_base 12: mod_base = OTHER; note = 2'-fluorouridine
  modified_base 13: mod_base = um
  modified_base 14: mod_base = OTHER; note = 2'-fluorocytidine
  modified_base 15: mod_base = cm
  modified_base 16: mod_base = OTHER; note = 2'-fluorouridine
  modified_base 17: mod_base = um
  modified_base 18: mod_base = gm
  modified_base 19: mod_base = um
  modified_base 20: mod_base = cm
  modified_base 20^21: mod_base = OTHER; note = phosphorothioate linkage
  modified_base 21: mod_base = gm
  source 1..21: mol_type = other RNA
tttgtaatcagttccttgtcg

SEQ ID NO: 770 - RNA, 21 nt, synthetic construct
  modified_base 1: mod_base = OTHER; note = 5 -cyclopropyl phosphonate-2 -O-methyluridine
  modified_base 1^2: mod_base = OTHER; note = phosphorothioate linkage
  modified_base 2: mod_base = OTHER; note = 2'-fluoroadenosine
  modified_base 2^3: mod_base = OTHER; note = phosphorothioate linkage
  modified_base 3: mod_base = OTHER; note = 2'-O-methyladenosine
  modified_base 3^4: mod_base = OTHER; note = phosphorothioate linkage
  modified_base 4: mod_base = OTHER; note = 2'-fluoroguanosine
  modified_base 5: mod_base = um
  modified_base 6: mod_base = OTHER; note = 2'-fluorouridine
  modified_base 7: mod_base = um
  modified_base 8: mod_base = OTHER; note = 2'-fluoroadenosine
  modified_base 9: mod_base = cm
  modified_base 10: mod_base = OTHER; note = 2'-fluoroadenosine
  modified_base 11: mod_base = um
  modified_base 12: mod_base = OTHER; note = 2'-fluorocytidine
  modified_base 13: mod_base = cm
  modified_base 14: mod_base = OTHER; note = 2'-fluorouridine
  modified_base 15: mod_base = gm
  modified_base 16: mod_base = OTHER; note = 2'-fluoroadenosine
  modified_base 17: mod_base = um
  modified_base 18: mod_base = OTHER; note = 2'-fluorouridine
  modified_base 19: mod_base = OTHER; note = 2'-O-methyladenosine
  modified_base 20: mod_base = OTHER; note = 2'-fluorouridine
  modified_base 20^21: mod_base = OTHER; note = phosphorothioate linkage
  modified_base 21: mod_base = gm
  source 1..21: mol_type = other RNA
taagtttacatcctgattatg

SEQ ID NO: 771 - RNA, 21 nt, synthetic construct
  modified_base 1: mod_base = OTHER; note = 5 -cyclopropyl phosphonate-2 -O-methyluridine
  modified_base 1^2: mod_base = OTHER; note = phosphorothioate linkage
  modified_base 2: mod_base = OTHER; note = 2'-fluoroadenosine
  modified_base 2^3: mod_base = OTHER; note = phosphorothioate linkage
  modified_base 3: mod_base = OTHER; note = 2'-O-methyladenosine
  modified_base 3^4: mod_base = OTHER; note = phosphorothioate linkage
  modified_base 4: mod_base = OTHER; note = 2'-fluoroguanosine
  modified_base 5: mod_base = um
  modified_base 6: mod_base = um
  modified_base 7: mod_base = um
  modified_base 8: mod_base = OTHER; note = 2'-O-methyladenosine
  modified_base 9: mod_base = cm
  modified_base 10: mod_base = OTHER; note = 2'-O-methyladenosine
  modified_base 11: mod_base = um
  modified_base 12: mod_base = OTHER; note = 2'-fluorocytidine
  modified_base 13: mod_base = cm
  modified_base 14: mod_base = OTHER; note = 2'-fluorouridine
  modified_base 15: mod_base = gm
  modified_base 16: mod_base = OTHER; note = 2'-fluoroadenosine
  modified_base 17: mod_base = um
  modified_base 18: mod_base = um
  modified_base 19: mod_base = OTHER; note = 2'-O-methyladenosine
  modified_base 20: mod_base = um
  modified_base 20^21: mod_base = OTHER; note = phosphorothioate linkage
  modified_base 21: mod_base = gm
  source 1..21: mol_type = other RNA
taagtttacatcctgattatg

SEQ ID NO: 772 - RNA, 21 nt, synthetic construct
  modified_base 1: mod_base = OTHER; note = 5 -cyclopropyl phosphonate-2 -O-methyluridine
  modified_base 1^2: mod_base = OTHER; note = phosphorothioate linkage
  modified_base 2: mod_base = OTHER; note = 2'-fluoroadenosine
  modified_base 2^3: mod_base = OTHER; note = phosphorothioate linkage
  modified_base 3: mod_base = OTHER; note = 2'-O-methyladenosine
  modified_base 3^4: mod_base = OTHER; note = phosphorothioate linkage
  modified_base 4: mod_base = OTHER; note = 2'-fluoroguanosine
  modified_base 5: mod_base = um
  modified_base 6: mod_base = um
  modified_base 7: mod_base = um
  modified_base 8: mod_base = OTHER; note = 2'-O-methyladenosine
  modified_base 9: mod_base = cm
  modified_base 10: mod_base = OTHER; note = 2'-O-methyladenosine
  modified_base 11: mod_base = um
  modified_base 12: mod_base = OTHER; note = 2'-fluorocytidine
  modified_base 13: mod_base = cm
  modified_base 14: mod_base = OTHER; note = 2'-fluorouridine
  modified_base 15: mod_base = gm
  modified_base 16: mod_base = OTHER; note = 2'-fluoroadenosine
  modified_base 17: mod_base = um
  modified_base 18: mod_base = um
  modified_base 19: mod_base = OTHER; note = 2'-O-methyladenosine
  modified_base 20: mod_base = cm
  modified_base 20^21: mod_base = OTHER; note = phosphorothioate linkage
  modified_base 21: mod_base = gm
  source 1..21: mol_type = other RNA
taagtttacatcctgattacg

SEQ ID NO: 773 - RNA, 21 nt, synthetic construct
  modified_base 1: mod_base = OTHER; note = 5 -cyclopropyl phosphonate-2 -O-methyluridine
  modified_base 1^2: mod_base = OTHER; note = phosphorothioate linkage
  modified_base 2: mod_base = OTHER; note = 2'-fluoroadenosine
  modified_base 2^3: mod_base = OTHER; note = phosphorothioate linkage
  modified_base 3: mod_base = OTHER; note = 2'-O-methyladenosine
  modified_base 3^4: mod_base = OTHER; note = phosphorothioate linkage
  modified_base 4: mod_base = OTHER; note = 2'-fluoroguanosine
  modified_base 5: mod_base = um
  modified_base 6: mod_base = um
  modified_base 7: mod_base = um
  modified_base 8: mod_base = OTHER; note = 2'-fluoroadenosine
  modified_base 9: mod_base = OTHER; note = 2'-fluorocytidine
  modified_base 10: mod_base = OTHER; note = 2'-O-methyladenosine
  modified_base 11: mod_base = um
  modified_base 12: mod_base = OTHER; note = 2'-fluorocytidine
  modified_base 13: mod_base = cm
  modified_base 14: mod_base = OTHER; note = 2'-fluorouridine
  modified_base 15: mod_base = gm
  modified_base 16: mod_base = OTHER; note = 2'-fluoroadenosine
  modified_base 17: mod_base = um
  modified_base 18: mod_base = um
  modified_base 19: mod_base = OTHER; note = 2'-O-methyladenosine
  modified_base 20: mod_base = um
  modified_base 20^21: mod_base = OTHER; note = phosphorothioate linkage
  modified_base 21: mod_base = gm
  source 1..21: mol_type = other RNA
taagtttacatcctgattatg

SEQ ID NO: 774 - RNA, 21 nt, synthetic construct
  modified_base 1: mod_base = OTHER; note = 5 -cyclopropyl phosphonate-2 -O-methyluridine
  modified_base 1^2: mod_base = OTHER; note = phosphorothioate linkage
  modified_base 2: mod_base = OTHER; note = 2'-fluoroadenosine
  modified_base 2^3: mod_base = OTHER; note = phosphorothioate linkage
  modified_base 3: mod_base = gm
  modified_base 3^4: mod_base = OTHER; note = phosphorothioate linkage
  modified_base 4: mod_base = OTHER; note = 2'-fluorocytidine
  modified_base 5: mod_base = um
  modified_base 6: mod_base = OTHER; note = 2'-fluoroadenosine
  modified_base 7: mod_base = um
  modified_base 8: mod_base = OTHER; note = 2'-fluoroguanosine
  modified_base 9: mod_base = um
  modified_base 10: mod_base = OTHER; note = 2'-fluoroadenosine
  modified_base 11: mod_base = OTHER; note = 2'-O-methyladenosine
  modified_base 12: mod_base = OTHER; note = 2'-fluoroguanosine
  modified_base 13: mod_base = um
  modified_base 14: mod_base = OTHER; note = 2'-fluorouridine
  modified_base 15: mod_base = um
  modified_base 16: mod_base = OTHER; note = 2'-fluoroadenosine
  modified_base 17: mod_base = cm
  modified_base 18: mod_base = OTHER; note = 2'-fluoroadenosine
  modified_base 19: mod_base = um
  modified_base 20: mod_base = OTHER; note = 2'-fluorocytidine
  modified_base 20^21: mod_base = OTHER; note = phosphorothioate linkage
  modified_base 21: mod_base = cm
  source 1..21: mol_type = other RNA
tagctatgtaagtttacatcc

SEQ ID NO: 775 - RNA, 21 nt, synthetic construct
  modified_base 1: mod_base = OTHER; note = 5 -cyclopropyl phosphonate-2 -O-methyluridine
  modified_base 1^2: mod_base = OTHER; note = phosphorothioate linkage
  modified_base 2: mod_base = OTHER; note = 2'-fluoroadenosine
  modified_base 2^3: mod_base = OTHER; note = phosphorothioate linkage
  modified_base 3: mod_base = gm
  modified_base 4: mod_base = cm
  modified_base 5: mod_base = um
  modified_base 6: mod_base = OTHER; note = 2'-O-methyladenosine
  modified_base 7: mod_base = um
  modified_base 8: mod_base = gm
  modified_base 9: mod_base = OTHER; note = 2'-fluorouridine
  modified_base 10: mod_base = OTHER; note = 2'-O-methyladenosine
  modified_base 11: mod_base = OTHER; note = 2'-O-methyladenosine
  modified_base 12: mod_base = OTHER; note = 2'-fluoroguanosine
  modified_base 13: mod_base = um
  modified_base 14: mod_base = OTHER; note = 2'-fluorouridine
  modified_base 15: mod_base = um
  modified_base 16: mod_base = OTHER; note = 2'-fluoroadenosine
  modified_base 17: mod_base = cm
  modified_base 18: mod_base = OTHER; note = 2'-O-methyladenosine
  modified_base 19: mod_base = um
  modified_base 19^20: mod_base = OTHER; note = phosphorothioate linkage
  modified_base 20: mod_base = cm
  modified_base 20^21: mod_base = OTHER; note = phosphorothioate linkage
  modified_base 21: mod_base = cm
  source 1..21: mol_type = other RNA
tagctatgtaagtttacatcc

SEQ ID NO: 776 - RNA, 21 nt, synthetic construct
  modified_base 1: mod_base = OTHER; note = 5 -cyclopropyl phosphonate-2 -O-methyluridine
  modified_base 1^2: mod_base = OTHER; note = phosphorothioate linkage
  modified_base 2: mod_base = OTHER; note = 2'-fluorocytidine
  modified_base 2^3: mod_base = OTHER; note = phosphorothioate linkage
  modified_base 3: mod_base = um
  modified_base 3^4: mod_base = OTHER; note = phosphorothioate linkage
  modified_base 4: mod_base = OTHER; note = 2'-fluorouridine
  modified_base 5: mod_base = OTHER; note = 2'-O-methyladenosine
  modified_base 6: mod_base = OTHER; note = 2'-O-methyladenosine
  modified_base 7: mod_base = gm
  modified_base 8: mod_base = OTHER; note = 2'-O-methyladenosine
  modified_base 9: mod_base = um
  modified_base 10: mod_base = um
  modified_base 11: mod_base = gm
  modified_base 12: mod_base = OTHER; note = 2'-fluorouridine
  modified_base 13: mod_base = cm
  modified_base 14: mod_base = OTHER; note = 2'-fluoroadenosine
  modified_base 15: mod_base = OTHER; note = 2'-O-methyladenosine
  modified_base 16: mod_base = OTHER; note = 2'-fluoroadenosine
  modified_base 17: mod_base = gm
  modified_base 18: mod_base = gm
  modified_base 19: mod_base = um
  modified_base 20: mod_base = gm
  modified_base 20^21: mod_base = OTHER; note = phosphorothioate linkage
  modified_base 21: mod_base = cm
  source 1..21: mol_type = other RNA
tcttaagattgtcaaaggtgc

SEQ ID NO: 777 - RNA, 21 nt, synthetic construct
  modified_base 1: mod_base = OTHER; note = 5 -cyclopropyl phosphonate-2 -O-methyluridine
  modified_base 1^2: mod_base = OTHER; note = phosphorothioate linkage
  modified_base 2: mod_base = OTHER; note = 2'-fluorocytidine
  modified_base 2^3: mod_base = OTHER; note = phosphorothioate linkage
  modified_base 3: mod_base = um
  modified_base 3^4: mod_base = OTHER; note = phosphorothioate linkage
  modified_base 4: mod_base = OTHER; note = 2'-fluorouridine
  modified_base 5: mod_base = OTHER; note = 2'-O-methyladenosine
  modified_base 6: mod_base = OTHER; note = 2'-O-methyladenosine
  modified_base 7: mod_base = gm
  modified_base 8: mod_base = OTHER; note = 2'-fluoroadenosine
  modified_base 9: mod_base = OTHER; note = 2'-fluorouridine
  modified_base 10: mod_base = um
  modified_base 11: mod_base = gm
  modified_base 12: mod_base = OTHER; note = 2'-fluorouridine
  modified_base 13: mod_base = cm
  modified_base 14: mod_base = OTHER; note = 2'-fluoroadenosine
  modified_base 15: mod_base = OTHER; note = 2'-O-methyladenosine
  modified_base 16: mod_base = OTHER; note = 2'-fluoroadenosine
  modified_base 17: mod_base = gm
  modified_base 18: mod_base = gm
  modified_base 19: mod_base = um
  modified_base 20: mod_base = gm
  modified_base 20^21: mod_base = OTHER; note = phosphorothioate linkage
  modified_base 21: mod_base = cm
  source 1..21: mol_type = other RNA
tcttaagattgtcaaaggtgc

SEQ ID NO: 778 - RNA, 21 nt, synthetic construct
  modified_base 1: mod_base = OTHER; note = 5 -cyclopropyl phosphonate-2 -O-methyluridine
  modified_base 1^2: mod_base = OTHER; note = phosphorothioate linkage
  modified_base 2: mod_base = OTHER; note = 2'-fluorocytidine
  modified_base 2^3: mod_base = OTHER; note = phosphorothioate linkage
  modified_base 3: mod_base = um
  modified_base 3^4: mod_base = OTHER; note = phosphorothioate linkage
  modified_base 4: mod_base = um
  modified_base 5: mod_base = OTHER; note = 2'-O-methyladenosine
  modified_base 6: mod_base = OTHER; note = 2'-O-methyladenosine
  modified_base 7: mod_base = OTHER; note = 2'-fluoroguanosine
  modified_base 8: mod_base = OTHER; note = 2'-O-methyladenosine
  modified_base 9: mod_base = um
  modified_base 10: mod_base = um
  modified_base 11: mod_base = gm
  modified_base 12: mod_base = OTHER; note = 2'-fluorouridine
  modified_base 13: mod_base = cm
  modified_base 14: mod_base = OTHER; note = 2'-fluoroadenosine
  modified_base 15: mod_base = OTHER; note = 2'-O-methyladenosine
  modified_base 16: mod_base = OTHER; note = 2'-fluoroadenosine
  modified_base 17: mod_base = gm
  modified_base 18: mod_base = gm
  modified_base 19: mod_base = um
  modified_base 20: mod_base = gm
  modified_base 20^21: mod_base = OTHER; note = phosphorothioate linkage
  modified_base 21: mod_base = cm
  source 1..21: mol_type = other RNA
tcttaagattgtcaaaggtgc

SEQ ID NO: 779 - RNA, 21 nt, synthetic construct
  modified_base 1: mod_base = OTHER; note = 5 -cyclopropyl phosphonate-2 -O-methyluridine
  modified_base 1^2: mod_base = OTHER; note = phosphorothioate linkage
  modified_base 2: mod_base = OTHER; note = 2'-fluorouridine
  modified_base 2^3: mod_base = OTHER; note = phosphorothioate linkage
  modified_base 3: mod_base = OTHER; note = 2'-O-methyladenosine
  modified_base 3^4: mod_base = OTHER; note = phosphorothioate linkage
  modified_base 4: mod_base = OTHER; note = 2'-fluoroguanosine
  modified_base 5: mod_base = um
  modified_base 6: mod_base = OTHER; note = 2'-fluoroadenosine
  modified_base 7: mod_base = gm
  modified_base 8: mod_base = OTHER; note = 2'-fluoroguanosine
  modified_base 9: mod_base = um
  modified_base 10: mod_base = OTHER; note = 2'-fluoroadenosine
  modified_base 11: mod_base = um
  modified_base 12: mod_base = OTHER; note = 2'-fluoroadenosine
  modified_base 13: mod_base = OTHER; note = 2'-O-methyladenosine
  modified_base 14: mod_base = OTHER; note = 2'-fluorocytidine
  modified_base 15: mod_base = cm
  modified_base 16: mod_base = OTHER; note = 2'-fluoroadenosine
  modified_base 17: mod_base = cm
  modified_base 18: mod_base = OTHER; note = 2'-fluoroadenosine
  modified_base 19: mod_base = gm
  modified_base 20: mod_base = OTHER; note = 2'-fluorocytidine
  modified_base 20^21: mod_base = OTHER; note = phosphorothioate linkage
  modified_base 21: mod_base = OTHER; note = 2'-O-methyladenosine
  source 1..21: mol_type = other RNA
ttagtaggtataaccacagca

SEQ ID NO: 780 - RNA, 21 nt, synthetic construct
  modified_base 1: mod_base = OTHER; note = 5 -cyclopropyl phosphonate-2 -O-methyladenosine
  modified_base 1^2: mod_base = OTHER; note = phosphorothioate linkage
  modified_base 2: mod_base = OTHER; note = 2'-fluoroadenosine
  modified_base 2^3: mod_base = OTHER; note = phosphorothioate linkage
  modified_base 3: mod_base = gm
  modified_base 3^4: mod_base = OTHER; note = phosphorothioate linkage
  modified_base 4: mod_base = OTHER; note = 2'-fluoroadenosine
  modified_base 5: mod_base = OTHER; note = 2'-O-methyladenosine
  modified_base 6: mod_base = OTHER; note = 2'-fluoroguanosine
  modified_base 7: mod_base = um
  modified_base 8: mod_base = OTHER; note = 2'-fluoroguanosine
  modified_base 9: mod_base = um
  modified_base 10: mod_base = OTHER; note = 2'-fluorocytidine
  modified_base 11: mod_base = um
  modified_base 12: mod_base = OTHER; note = 2'-fluorouridine
  modified_base 13: mod_base = OTHER; note = 2'-O-methyladenosine
  modified_base 14: mod_base = OTHER; note = 2'-fluoroadenosine
  modified_base 15: mod_base = gm
  modified_base 16: mod_base = OTHER; note = 2'-fluoroadenosine
  modified_base 17: mod_base = um
  modified_base 18: mod_base = OTHER; note = 2'-fluorouridine
  modified_base 19: mod_base = gm
  modified_base 20: mod_base = OTHER; note = 2'-fluorouridine
  modified_base 20^21: mod_base = OTHER; note = phosphorothioate linkage
  modified_base 21: mod_base = cm
  source 1..21: mol_type = other RNA
aagaagtgtcttaagattgtc

SEQ ID NO: 781 - DNA, 21 bp, synthetic construct
  modified_base 1: mod_base = OTHER; note = 5 -cyclopropyl phosphonate-2 -O-methyluridine
  modified_base 1^2: mod_base = OTHER; note = phosphorothioate linkage
  modified_base 2: mod_base = OTHER; note = 2'-fluorocytidine
  modified_base 2^3: mod_base = OTHER; note = phosphorothioate linkage
  modified_base 3: mod_base = OTHER; note = 2'-O-methyladenosine
  modified_base 3^4: mod_base = OTHER; note = phosphorothioate linkage
  modified_base 4: mod_base = OTHER; note = 2'-fluorouridine
  modified_base 5: mod_base = OTHER; note = 2'-O-methyladenosine
  modified_base 6: mod_base = OTHER; note = 2'-fluoroadenosine
  modified_base 7: mod_base = gm
  modified_base 8: mod_base = OTHER; note = 2'-fluoroadenosine
  modified_base 9: mod_base = OTHER; note = 2'-O-methyladenosine
  modified_base 10: mod_base = OTHER; note = 2'-fluoroadenosine
  modified_base 11: mod_base = gm
  modified_base 12: mod_base = OTHER; note = 2'-fluorouridine
  modified_base 13: mod_base = gm
  modified_base 14: mod_base = OTHER; note = 2'-fluorouridine
  modified_base 15: mod_base = gm
  modified_base 16: mod_base = OTHER; note = 2'-fluorocytidine
  modified_base 17: mod_base = cm
  modified_base 18: mod_base = OTHER; note = 2'-fluorocytidine
  modified_base 19: mod_base = OTHER; note = 2'-O-methyladenosine
  modified_base 20: mod_base = OTHER; note = 2'-fluorouridine
  modified_base 20^21: mod_base = OTHER; note = phosphorothioate linkage
  modified_base 21: mod_base = gm
  source 1..21: mol_type = other DNA
tcataagaaagtgtgcccatg

SEQ ID NO: 782 - RNA, 21 nt, synthetic construct
  modified_base 1: mod_base = OTHER; note = 5 -cyclopropyl phosphonate-2 -O-methyluridine
  modified_base 1^2: mod_base = OTHER; note = phosphorothioate linkage
  modified_base 2: mod_base = OTHER; note = 2'-fluoroadenosine
  modified_base 2^3: mod_base = OTHER; note = phosphorothioate linkage
  modified_base 3: mod_base = OTHER; note = 2'-O-methyladenosine
  modified_base 3^4: mod_base = OTHER; note = phosphorothioate linkage
  modified_base 4: mod_base = OTHER; note = 2'-fluorocytidine
  modified_base 5: mod_base = um
  modified_base 6: mod_base = OTHER; note = 2'-fluorouridine
  modified_base 7: mod_base = OTHER; note = 2'-O-methyladenosine
  modified_base 8: mod_base = OTHER; note = 2'-fluoroguanosine
  modified_base 9: mod_base = gm
  modified_base 10: mod_base = OTHER; note = 2'-fluoroguanosine
  modified_base 11: mod_base = um
  modified_base 12: mod_base = OTHER; note = 2'-fluorocytidine
  modified_base 13: mod_base = OTHER; note = 2'-O-methyladenosine
  modified_base 14: mod_base = OTHER; note = 2'-fluoroadenosine
  modified_base 15: mod_base = um
  modified_base 16: mod_base = OTHER; note = 2'-fluorouridine
  modified_base 17: mod_base = um
  modified_base 18: mod_base = OTHER; note = 2'-fluorocytidine
  modified_base 19: mod_base = um
  modified_base 20: mod_base = OTHER; note = 2'-fluoroguanosine
  modified_base 20^21: mod_base = OTHER; note = phosphorothioate linkage
  modified_base 21: mod_base = um
  source 1..21: mol_type = other RNA
taacttagggtcaatttctgt

SEQ ID NO: 783 - RNA, 21 nt, synthetic construct
  modified_base 1: mod_base = OTHER; note = 5 -cyclopropyl phosphonate-2 -O-methyladenosine
  modified_base 1^2: mod_base = OTHER; note = phosphorothioate linkage
  modified_base 2: mod_base = OTHER; note = 2'-fluoroadenosine
  modified_base 2^3: mod_base = OTHER; note = phosphorothioate linkage
  modified_base 3: mod_base = OTHER; note = 2'-O-methyladenosine
  modified_base 3^4: mod_base = OTHER; note = phosphorothioate linkage
  modified_base 4: mod_base = OTHER; note = 2'-fluorocytidine
  modified_base 5: mod_base = gm
  modified_base 6: mod_base = OTHER; note = 2'-fluorouridine
  modified_base 7: mod_base = OTHER; note = 2'-O-methyladenosine
  modified_base 8: mod_base = OTHER; note = 2'-fluorouridine
  modified_base 9: mod_base = um
  modified_base 10: mod_base = OTHER; note = 2'-fluoroadenosine
  modified_base 11: mod_base = OTHER; note = 2'-O-methyladenosine
  modified_base 12: mod_base = OTHER; note = 2'-fluorocytidine
  modified_base 13: mod_base = gm
  modified_base 14: mod_base = OTHER; note = 2'-fluorouridine
  modified_base 15: mod_base = OTHER; note = 2'-O-methyladenosine
  modified_base 16: mod_base = OTHER; note = 2'-fluoroadenosine
  modified_base 17: mod_base = gm
  modified_base 18: mod_base = OTHER; note = 2'-fluorocytidine
  modified_base 19: mod_base = OTHER; note = 2'-O-methyladenosine
  modified_base 20: mod_base = OTHER; note = 2'-fluorouridine
  modified_base 20^21: mod_base = OTHER; note = phosphorothioate linkage
  modified_base 21: mod_base = cm
  source 1..21: mol_type = other RNA
aaacgtattaacgtaagcatc

SEQ ID NO: 784 - RNA, 21 nt, synthetic construct
  modified_base 1: mod_base = OTHER; note = 5 -cyclopropyl phosphonate-2 -O-methyladenosine
  modified_base 1^2: mod_base = OTHER; note = phosphorothioate linkage
  modified_base 2: mod_base = OTHER; note = 2'-fluorouridine
  modified_base 2^3: mod_base = OTHER; note = phosphorothioate linkage
  modified_base 3: mod_base = OTHER; note = 2'-O-methyladenosine
  modified_base 3^4: mod_base = OTHER; note = phosphorothioate linkage
  modified_base 4: mod_base = OTHER; note = 2'-fluorocytidine
  modified_base 5: mod_base = OTHER; note = 2'-O-methyladenosine
  modified_base 6: mod_base = OTHER; note = 2'-fluorouridine
  modified_base 7: mod_base = um
  modified_base 8: mod_base = OTHER; note = 2'-fluorouridine
  modified_base 9: mod_base = gm
  modified_base 10: mod_base = OTHER; note = 2'-fluoroguanosine
  modified_base 11: mod_base = gm
  modified_base 12: mod_base = OTHER; note = 2'-fluorouridine
  modified_base 13: mod_base = cm
  modified_base 14: mod_base = OTHER; note = 2'-fluoroadenosine
  modified_base 15: mod_base = um
  modified_base 16: mod_base = OTHER; note = 2'-fluoroadenosine
  modified_base 17: mod_base = gm
  modified_base 18: mod_base = OTHER; note = 2'-fluorocytidine
  modified_base 19: mod_base = um
  modified_base 20: mod_base = OTHER; note = 2'-fluorouridine
  modified_base 20^21: mod_base = OTHER; note = phosphorothioate linkage
  modified_base 21: mod_base = gm
  source 1..21: mol_type = other RNA
atacatttgggtcatagcttg

SEQ ID NO: 785 - RNA, 21 nt, synthetic construct
  modified_base 1: mod_base = OTHER; note = 5 -cyclopropyl phosphonate-2 -O-methyluridine
  modified_base 1^2: mod_base = OTHER; note = phosphorothioate linkage
  modified_base 2: mod_base = OTHER; note = 2'-fluorocytidine
  modified_base 2^3: mod_base = OTHER; note = phosphorothioate linkage
  modified_base 3: mod_base = OTHER; note = 2'-O-methyladenosine
  modified_base 3^4: mod_base = OTHER; note = phosphorothioate linkage
  modified_base 4: mod_base = OTHER; note = 2'-fluorouridine
  modified_base 5: mod_base = um
  modified_base 6: mod_base = OTHER; note = 2'-fluoroadenosine
  modified_base 7: mod_base = OTHER; note = 2'-O-methyladenosine
  modified_base 8: mod_base = OTHER; note = 2'-fluoroguanosine
  modified_base 9: mod_base = OTHER; note = 2'-O-methyladenosine
  modified_base 10: mod_base = OTHER; note = 2'-fluorouridine
  modified_base 11: mod_base = cm
  modified_base 12: mod_base = OTHER; note = 2'-fluorouridine
  modified_base 13: mod_base = gm
  modified_base 14: mod_base = OTHER; note = 2'-fluoroadenosine
  modified_base 15: mod_base = OTHER; note = 2'-O-methyladenosine
  modified_base 16: mod_base = OTHER; note = 2'-fluorouridine
  modified_base 17: mod_base = cm
  modified_base 18: mod_base = OTHER; note = 2'-fluoroguanosine
  modified_base 19: mod_base = OTHER; note = 2'-O-methyladenosine
  modified_base 20: mod_base = OTHER; note = 2'-fluorocytidine
  modified_base 20^21: mod_base = OTHER; note = phosphorothioate linkage
  modified_base 21: mod_base = OTHER; note = 2'-O-methyladenosine
  source 1..21: mol_type = other RNA
tcattaagatctgaatcgaca

SEQ ID NO: 786 - DNA, 21 bp, synthetic construct
  modified_base 1: mod_base = OTHER; note = 5 -cyclopropyl phosphonate-2 -O-methyladenosine
  modified_base 1^2: mod_base = OTHER; note = phosphorothioate linkage
  modified_base 2: mod_base = OTHER; note = 2'-fluoroadenosine
  modified_base 2^3: mod_base = OTHER; note = phosphorothioate linkage
  modified_base 3: mod_base = gm
  modified_base 3^4: mod_base = OTHER; note = phosphorothioate linkage
  modified_base 4: mod_base = OTHER; note = 2'-fluoroadenosine
  modified_base 5: mod_base = OTHER; note = 2'-O-methyladenosine
  modified_base 6: mod_base = OTHER; note = 2'-fluorouridine
  modified_base 7: mod_base = OTHER; note = 2'-O-methyladenosine
  modified_base 8: mod_base = OTHER; note = 2'-fluorocytidine
  modified_base 9: mod_base = cm
  modified_base 10: mod_base = OTHER; note = 2'-fluoroadenosine
  modified_base 11: mod_base = cm
  modified_base 12: mod_base = OTHER; note = 2'-fluoroguanosine
  modified_base 13: mod_base = OTHER; note = 2'-O-methyladenosine
  modified_base 14: mod_base = OTHER; note = 2'-fluoroadenosine
  modified_base 15: mod_base = OTHER; note = 2'-O-methyladenosine
  modified_base 16: mod_base = OTHER; note = 2'-fluoroguanosine
  modified_base 17: mod_base = cm
  modified_base 18: mod_base = OTHER; note = 2'-fluoroadenosine
  modified_base 19: mod_base = OTHER; note = 2'-O-methyladenosine
  modified_base 20: mod_base = OTHER; note = 2'-fluoroguanosine
  modified_base 20^21: mod_base = OTHER; note = phosphorothioate linkage
  modified_base 21: mod_base = cm
  source 1..21: mol_type = other DNA
aagaataccacgaaagcaagc

SEQ ID NO: 787 - RNA, 21 nt, synthetic construct
  modified_base 1: mod_base = OTHER; note = 5 -cyclopropyl phosphonate-2 -O-methyluridine
  modified_base 2: mod_base = OTHER; note = 2'-fluorouridine
  modified_base 3: mod_base = OTHER; note = 2'-O-methyladenosine
  modified_base 4: mod_base = OTHER; note = 2'-fluoroguanosine
  modified_base 5: mod_base = gm
  modified_base 6: mod_base = OTHER; note = 2'-O-methyladenosine
  modified_base 7: mod_base = um
  modified_base 8: mod_base = um
  modified_base 9: mod_base = um
  modified_base 10: mod_base = um
  modified_base 11: mod_base = cm
  modified_base 12: mod_base = OTHER; note = 2'-fluorocytidine
  modified_base 13: mod_base = OTHER; note = 2'-O-methyladenosine
  modified_base 14: mod_base = OTHER; note = 2'-fluorocytidine
  modified_base 15: mod_base = um
  modified_base 16: mod_base = OTHER; note = 2'-fluoroadenosine
  modified_base 17: mod_base = cm
  modified_base 18: mod_base = um
  modified_base 19: mod_base = um
  modified_base 19^20: mod_base = OTHER; note = phosphorothioate linkage
  modified_base 20: mod_base = cm
  modified_base 20^21: mod_base = OTHER; note = phosphorothioate linkage
  modified_base 21: mod_base = cm
  source 1..21: mol_type = other RNA
ttaggattttccactacttcc

SEQ ID NO: 788 - RNA, 21 nt, synthetic construct
  modified_base 1: mod_base = OTHER; note = 5 -cyclopropyl phosphonate-2 -O-methyluridine
  modified_base 2: mod_base = OTHER; note = 2'-fluorouridine
  modified_base 3: mod_base = OTHER; note = 2'-O-methyladenosine
  modified_base 4: mod_base = OTHER; note = 2'-fluoroguanosine
  modified_base 5: mod_base = gm
  modified_base 6: mod_base = OTHER; note = 2'-O-methyladenosine
  modified_base 7: mod_base = um
  modified_base 8: mod_base = um
  modified_base 9: mod_base = um
  modified_base 10: mod_base = um
  modified_base 11: mod_base = cm
  modified_base 12: mod_base = OTHER; note = 2'-fluorocytidine
  modified_base 13: mod_base = OTHER; note = 2'-O-methyladenosine
  modified_base 14: mod_base = OTHER; note = 2'-fluorocytidine
  modified_base 15: mod_base = um
  modified_base 16: mod_base = OTHER; note = 2'-fluoroadenosine
  modified_base 17: mod_base = cm
  modified_base 18: mod_base = um
  modified_base 19: mod_base = um
  modified_base 19^20: mod_base = OTHER; note = phosphorothioate linkage
  modified_base 20: mod_base = cm
  modified_base 20^21: mod_base = OTHER; note = phosphorothioate linkage
  modified_base 21: mod_base = gm
  source 1..21: mol_type = other RNA
ttaggattttccactacttcg

SEQ ID NO: 789 - RNA, 21 nt, synthetic construct
  modified_base 1: mod_base = OTHER; note = 5 -cyclopropyl phosphonate-2 -O-methyluridine
  modified_base 1^2: mod_base = OTHER; note = phosphorothioate linkage
  modified_base 2: mod_base = OTHER; note = 2'-fluorouridine
  modified_base 2^3: mod_base = OTHER; note = phosphorothioate linkage
  modified_base 3: mod_base = um
  modified_base 4: mod_base = OTHER; note = 2'-fluoroguanosine
  modified_base 5: mod_base = um
  modified_base 6: mod_base = OTHER; note = 2'-O-methyladenosine
  modified_base 7: mod_base = OTHER; note = 2'-O-methyladenosine
  modified_base 8: mod_base = um
  modified_base 9: mod_base = cm
  modified_base 10: mod_base = OTHER; note = 2'-O-methyladenosine
  modified_base 11: mod_base = gm
  modified_base 12: mod_base = OTHER; note = 2'-fluorouridine
  modified_base 13: mod_base = um
  modified_base 14: mod_base = OTHER; note = 2'-fluorocytidine
  modified_base 15: mod_base = cm
  modified_base 16: mod_base = OTHER; note = 2'-fluorouridine
  modified_base 17: mod_base = um
  modified_base 18: mod_base = gm
  modified_base 19: mod_base = um
  modified_base 19^20: mod_base = OTHER; note = phosphorothioate linkage
  modified_base 20: mod_base = cm
  modified_base 20^21: mod_base = OTHER; note = phosphorothioate linkage
  modified_base 21: mod_base = um
  source 1..21: mol_type = other RNA
tttgtaatcagttccttgtct

SEQ ID NO: 790 - RNA, 21 nt, synthetic construct
  modified_base 1: mod_base = OTHER; note = 5 -cyclopropyl phosphonate-2 -O-methyluridine
  modified_base 1^2: mod_base = OTHER; note = phosphorothioate linkage
  modified_base 2: mod_base = OTHER; note = 2'-fluoroadenosine
  modified_base 2^3: mod_base = OTHER; note = phosphorothioate linkage
  modified_base 3: mod_base = OTHER; note = 2'-O-methyladenosine
  modified_base 4: mod_base = OTHER; note = 2'-fluoroguanosine
  modified_base 5: mod_base = um
  modified_base 6: mod_base = um
  modified_base 7: mod_base = um
  modified_base 8: mod_base = OTHER; note = 2'-O-methyladenosine
  modified_base 9: mod_base = cm
  modified_base 10: mod_base = OTHER; note = 2'-O-methyladenosine
  modified_base 11: mod_base = um
  modified_base 12: mod_base = OTHER; note = 2'-fluorocytidine
  modified_base 13: mod_base = cm
  modified_base 14: mod_base = OTHER; note = 2'-fluorouridine
  modified_base 15: mod_base = gm
  modified_base 16: mod_base = OTHER; note = 2'-fluoroadenosine
  modified_base 17: mod_base = um
  modified_base 18: mod_base = um
  modified_base 19: mod_base = OTHER; note = 2'-O-methyladenosine
  modified_base 19^20: mod_base = OTHER; note = phosphorothioate linkage
  modified_base 20: mod_base = um
  modified_base 20^21: mod_base = OTHER; note = phosphorothioate linkage
  modified_base 21: mod_base = gm
  source 1..21: mol_type = other RNA
taagtttacatcctgattatg

SEQ ID NO: 791 - RNA, 21 nt, synthetic construct
  modified_base 1: mod_base = OTHER; note = 5 -cyclopropyl phosphonate-2 -O-methyluridine
  modified_base 2: mod_base = OTHER; note = 2'-fluoroadenosine
  modified_base 3: mod_base = OTHER; note = 2'-O-methyladenosine
  modified_base 4: mod_base = OTHER; note = 2'-fluoroguanosine
  modified_base 5: mod_base = um
  modified_base 6: mod_base = um
  modified_base 7: mod_base = um
  modified_base 8: mod_base = OTHER; note = 2'-O-methyladenosine
  modified_base 9: mod_base = cm
  modified_base 10: mod_base = OTHER; note = 2'-O-methyladenosine
  modified_base 11: mod_base = um
  modified_base 12: mod_base = OTHER; note = 2'-fluorocytidine
  modified_base 13: mod_base = cm
  modified_base 14: mod_base = OTHER; note = 2'-fluorouridine
  modified_base 15: mod_base = gm
  modified_base 16: mod_base = OTHER; note = 2'-fluoroadenosine
  modified_base 17: mod_base = um
  modified_base 18: mod_base = um
  modified_base 19: mod_base = OTHER; note = 2'-O-methyladenosine
  modified_base 20: mod_base = um
  modified_base 20^21: mod_base = OTHER; note = phosphorothioate linkage
  modified_base 21: mod_base = gm
  source 1..21: mol_type = other RNA
taagtttacatcctgattatg

SEQ ID NO: 792 - RNA, 21 nt, synthetic construct
  modified_base 1: mod_base = OTHER; note = 5 -cyclopropyl phosphonate-2 -O-methyluridine
  modified_base 2: mod_base = OTHER; note = 2'-fluoroadenosine
  modified_base 3: mod_base = OTHER; note = 2'-O-methyladenosine
  modified_base 4: mod_base = OTHER; note = 2'-fluoroguanosine
  modified_base 5: mod_base = um
  modified_base 6: mod_base = um
  modified_base 7: mod_base = um
  modified_base 8: mod_base = OTHER; note = 2'-O-methyladenosine
  modified_base 9: mod_base = cm
  modified_base 10: mod_base = OTHER; note = 2'-O-methyladenosine
  modified_base 11: mod_base = um
  modified_base 12: mod_base = OTHER; note = 2'-fluorocytidine
  modified_base 13: mod_base = cm
  modified_base 14: mod_base = OTHER; note = 2'-fluorouridine
  modified_base 15: mod_base = gm
  modified_base 16: mod_base = OTHER; note = 2'-fluoroadenosine
  modified_base 17: mod_base = um
  modified_base 18: mod_base = um
  modified_base 19: mod_base = OTHER; note = 2'-O-methyladenosine
  modified_base 19^20: mod_base = OTHER; note = phosphorothioate linkage
  modified_base 20: mod_base = cm
  modified_base 20^21: mod_base = OTHER; note = phosphorothioate linkage
  modified_base 21: mod_base = gm
  source 1..21: mol_type = other RNA
taagtttacatcctgattacg

SEQ ID NO: 793 - RNA, 21 nt, synthetic construct
  modified_base 1: mod_base = OTHER; note = 5 -cyclopropyl phosphonate-2 -O-methyluridine
  modified_base 1^2: mod_base = OTHER; note = phosphorothioate linkage
  modified_base 2: mod_base = OTHER; note = 2'-fluorouridine
  modified_base 2^3: mod_base = OTHER; note = phosphorothioate linkage
  modified_base 3: mod_base = OTHER; note = 2'-O-methyladenosine
  modified_base 4: mod_base = OTHER; note = 2'-fluoroguanosine
  modified_base 5: mod_base = gm
  modified_base 6: mod_base = OTHER; note = 2'-O-methyladenosine
  modified_base 7: mod_base = um
  modified_base 8: mod_base = um
  modified_base 9: mod_base = um
  modified_base 10: mod_base = um
  modified_base 11: mod_base = cm
  modified_base 12: mod_base = OTHER; note = 2'-fluorocytidine
  modified_base 13: mod_base = OTHER; note = 2'-O-methyladenosine
  modified_base 14: mod_base = OTHER; note = 2'-fluorocytidine
  modified_base 15: mod_base = um
  modified_base 16: mod_base = OTHER; note = 2'-fluoroadenosine
  modified_base 17: mod_base = cm
  modified_base 18: mod_base = um
  modified_base 19: mod_base = um
  modified_base 19^20: mod_base = OTHER; note = phosphorothioate linkage
  modified_base 20: mod_base = cm
  modified_base 20^21: mod_base = OTHER; note = phosphorothioate linkage
  modified_base 21: mod_base = gm
  source 1..21: mol_type = other RNA
ttaggattttccactacttcg

SEQ ID NO: 794 - RNA, 21 nt, synthetic construct
  modified_base 1: mod_base = gm
  modified_base 2: mod_base = OTHER; note = 2'-O-methyladenosine
  modified_base 3: mod_base = cm
  modified_base 4: mod_base = OTHER; note = 2'-O-methyladenosine
  modified_base 5: mod_base = cm
  modified_base 6: mod_base = OTHER; note = 2'-O-methyladenosine
  modified_base 7: mod_base = cm
  modified_base 8: mod_base = gm
  modified_base 9: mod_base = OTHER; note = 2'-fluorouridine
  modified_base 10: mod_base = OTHER; note = 2'-fluorocytidine
  modified_base 11: mod_base = OTHER; note = 2'-fluorocytidine
  modified_base 12: mod_base = OTHER; note = 2'-O-methyladenosine
  modified_base 13: mod_base = OTHER; note = 2'-O-methyladenosine
  modified_base 14: mod_base = cm
  modified_base 15: mod_base = um
  modified_base 16: mod_base = cm
  modified_base 17: mod_base = OTHER; note = 2'-O-methyladenosine
  modified_base 18: mod_base = gm
  modified_base 19: mod_base = um
  modified_base 20: mod_base = um
  modified_base 21: mod_base = um
  source 1..21: mol_type = other RNA
gacacacgtccaactcagttt

SEQ ID NO: 795 - RNA, 21 nt, synthetic construct
  modified_base 1: mod_base = gm
  modified_base 2: mod_base = gm
  modified_base 3: mod_base = OTHER; note = 2'-O-methyladenosine
  modified_base 4: mod_base = OTHER; note = 2'-O-methyladenosine
  modified_base 5: mod_base = gm
  modified_base 6: mod_base = OTHER; note = 2'-O-methyladenosine
  modified_base 7: mod_base = OTHER; note = 2'-O-methyladenosine
  modified_base 8: mod_base = gm
  modified_base 9: mod_base = OTHER; note = 2'-fluorouridine
  modified_base 10: mod_base = OTHER; note = 2'-fluoroadenosine
  modified_base 11: mod_base = OTHER; note = 2'-fluoroguanosine
  modified_base 12: mod_base = um
  modified_base 13: mod_base = gm
  modified_base 14: mod_base = gm
  modified_base 15: mod_base = OTHER; note = 2'-O-methyladenosine
  modified_base 16: mod_base = OTHER; note = 2'-O-methyladenosine
  modified_base 17: mod_base = OTHER; note = 2'-O-methyladenosine
  modified_base 18: mod_base = OTHER; note = 2'-O-methyladenosine
  modified_base 19: mod_base = um
  modified_base 20: mod_base = cm
  modified_base 21: mod_base = OTHER; note = 2'-O-methyladenosine
  source 1..21: mol_type = other RNA
ggaagaagtagtggaaaatca

SEQ ID NO: 796 - RNA, 21 nt, synthetic construct
  modified_base 1: mod_base = gm
  modified_base 2: mod_base = gm
  modified_base 3: mod_base = OTHER; note = 2'-O-methyladenosine
  modified_base 4: mod_base = OTHER; note = 2'-O-methyladenosine
  modified_base 5: mod_base = gm
  modified_base 6: mod_base = um
  modified_base 7: mod_base = OTHER; note = 2'-O-methyladenosine
  modified_base 8: mod_base = gm
  modified_base 9: mod_base = OTHER; note = 2'-fluorouridine
  modified_base 10: mod_base = OTHER; note = 2'-fluoroguanosine
  modified_base 11: mod_base = OTHER; note = 2'-fluoroguanosine
  modified_base 12: mod_base = OTHER; note = 2'-O-methyladenosine
  modified_base 13: mod_base = OTHER; note = 2'-O-methyladenosine
  modified_base 14: mod_base = OTHER; note = 2'-O-methyladenosine
  modified_base 15: mod_base = OTHER; note = 2'-O-methyladenosine
  modified_base 16: mod_base = um
  modified_base 17: mod_base = cm
  modified_base 18: mod_base = cm
  modified_base 19: mod_base = um
  modified_base 20: mod_base = OTHER; note = 2'-O-methyladenosine
  modified_base 21: mod_base = OTHER; note = 2'-O-methyladenosine
  source 1..21: mol_type = other RNA
ggaagtagtggaaaatcctaa

SEQ ID NO: 797 - RNA, 21 nt, synthetic construct
  modified_base 1: mod_base = gm
  modified_base 2: mod_base = um
  modified_base 3: mod_base = cm
  modified_base 4: mod_base = OTHER; note = 2'-O-methyladenosine
  modified_base 5: mod_base = um
  modified_base 6: mod_base = gm
  modified_base 7: mod_base = um
  modified_base 8: mod_base = gm
  modified_base 9: mod_base = OTHER; note = 2'-fluoroguanosine
  modified_base 10: mod_base = OTHER; note = 2'-fluorouridine
  modified_base 11: mod_base = OTHER; note = 2'-fluoroadenosine
  modified_base 12: mod_base = gm
  modified_base 13: mod_base = um
  modified_base 14: mod_base = gm
  modified_base 15: mod_base = um
  modified_base 16: mod_base = um
  modified_base 17: mod_base = OTHER; note = 2 -O-methylinosine
  modified_base 18: mod_base = gm
  modified_base 19: mod_base = um
  modified_base 20: mod_base = um
  modified_base 21: mod_base = um
  source 1..21: mol_type = other RNA
gtcatgtggtagtgttngttt

SEQ ID NO: 798 - RNA, 21 nt, synthetic construct
  modified_base 1: mod_base = cm
  modified_base 2: mod_base = OTHER; note = 2'-O-methyladenosine
  modified_base 3: mod_base = OTHER; note = 2'-O-methyladenosine
  modified_base 4: mod_base = gm
  modified_base 5: mod_base = cm
  modified_base 6: mod_base = um
  modified_base 7: mod_base = OTHER; note = 2'-O-methyladenosine
  modified_base 8: mod_base = um
  modified_base 9: mod_base = OTHER; note = 2'-fluoroguanosine
  modified_base 10: mod_base = OTHER; note = 2'-fluoroadenosine
  modified_base 11: mod_base = OTHER; note = 2'-fluorocytidine
  modified_base 12: mod_base = cm
  modified_base 13: mod_base = cm
  modified_base 14: mod_base = OTHER; note = 2'-O-methyladenosine
  modified_base 15: mod_base = OTHER; note = 2'-O-methyladenosine
  modified_base 16: mod_base = OTHER; note = 2'-O-methyladenosine
  modified_base 17: mod_base = um
  modified_base 18: mod_base = gm
  modified_base 19: mod_base = um
  modified_base 20: mod_base = OTHER; note = 2'-O-methyladenosine
  modified_base 21: mod_base = um
  source 1..21: mol_type = other RNA
caagctatgacccaaatgtat

SEQ ID NO: 799 - RNA, 21 nt, synthetic construct
  modified_base 1: mod_base = gm
  modified_base 2: mod_base = OTHER; note = 2'-O-methyladenosine
  modified_base 3: mod_base = cm
  modified_base 4: mod_base = OTHER; note = 2'-O-methyladenosine
  modified_base 5: mod_base = um
  modified_base 6: mod_base = gm
  modified_base 7: mod_base = gm
  modified_base 8: mod_base = um
  modified_base 9: mod_base = OTHER; note = 2'-fluoroadenosine
  modified_base 10: mod_base = OTHER; note = 2'-fluorocytidine
  modified_base 11: mod_base = OTHER; note = 2'-fluorocytidine
  modified_base 12: mod_base = OTHER; note = 2'-O-methyladenosine
  modified_base 13: mod_base = cm
  modified_base 14: mod_base = OTHER; note = 2'-O-methyladenosine
  modified_base 15: mod_base = um
  modified_base 16: mod_base = OTHER; note = 2'-O-methyladenosine
  modified_base 17: mod_base = um
  modified_base 18: mod_base = OTHER; note = 2'-O-methyladenosine
  modified_base 19: mod_base = um
  modified_base 20: mod_base = cm
  modified_base 21: mod_base = OTHER; note = 2'-O-methyladenosine
  source 1..21: mol_type = other RNA
gacatggtaccacatatatca

SEQ ID NO: 800 - RNA, 21 nt, synthetic construct
  modified_base 1: mod_base = gm
  modified_base 2: mod_base = cm
  modified_base 3: mod_base = OTHER; note = 2'-O-methyladenosine
  modified_base 4: mod_base = um
  modified_base 5: mod_base = gm
  modified_base 6: mod_base = gm
  modified_base 7: mod_base = um
  modified_base 8: mod_base = OTHER; note = 2'-O-methyladenosine
  modified_base 9: mod_base = OTHER; note = 2'-fluorocytidine
  modified_base 10: mod_base = OTHER; note = 2'-fluorocytidine
  modified_base 11: mod_base = OTHER; note = 2'-fluoroadenosine
  modified_base 12: mod_base = cm
  modified_base 13: mod_base = OTHER; note = 2'-O-methyladenosine
  modified_base 14: mod_base = um
  modified_base 15: mod_base = OTHER; note = 2'-O-methyladenosine
  modified_base 16: mod_base = um
  modified_base 17: mod_base = OTHER; note = 2'-O-methyladenosine
  modified_base 18: mod_base = um
  modified_base 19: mod_base = cm
  modified_base 20: mod_base = OTHER; note = 2'-O-methyladenosine
  modified_base 21: mod_base = OTHER; note = 2'-O-methyladenosine
  source 1..21: mol_type = other RNA
gcatggtaccacatatatcaa

SEQ ID NO: 801 - RNA, 21 nt, synthetic construct
  modified_base 1: mod_base = gm
  modified_base 2: mod_base = gm
  modified_base 3: mod_base = um
  modified_base 4: mod_base = OTHER; note = 2'-O-methyladenosine
  modified_base 5: mod_base = cm
  modified_base 6: mod_base = OTHER; note = 2'-O-methyladenosine
  modified_base 7: mod_base = um
  modified_base 8: mod_base = OTHER; note = 2'-O-methyladenosine
  modified_base 9: mod_base = OTHER; note = 2'-fluoroadenosine
  modified_base 10: mod_base = OTHER; note = 2'-fluorouridine
  modified_base 11: mod_base = OTHER; note = 2'-fluorocytidine
  modified_base 12: mod_base = OTHER; note = 2'-O-methyladenosine
  modified_base 13: mod_base = gm
  modified_base 14: mod_base = gm
  modified_base 15: mod_base = OTHER; note = 2'-O-methyladenosine
  modified_base 16: mod_base = um
  modified_base 17: mod_base = gm
  modified_base 18: mod_base = um
  modified_base 19: mod_base = OTHER; note = 2'-O-methyladenosine
  modified_base 20: mod_base = OTHER; note = 2'-O-methyladenosine
  modified_base 21: mod_base = OTHER; note = 2'-O-methyladenosine
  source 1..21: mol_type = other RNA
ggtacataatcaggatgtaaa

SEQ ID NO: 802 - RNA, 21 nt, synthetic construct
  modified_base 1: mod_base = gm
  modified_base 2: mod_base = cm
  modified_base 3: mod_base = OTHER; note = 2'-O-methyladenosine
  modified_base 4: mod_base = um
  modified_base 5: mod_base = OTHER; note = 2'-O-methyladenosine
  modified_base 6: mod_base = OTHER; note = 2'-O-methyladenosine
  modified_base 7: mod_base = um
  modified_base 8: mod_base = cm
  modified_base 9: mod_base = OTHER; note = 2'-fluoroadenosine
  modified_base 10: mod_base = OTHER; note = 2'-fluoroguanosine
  modified_base 11: mod_base = OTHER; note = 2'-fluoroguanosine
  modified_base 12: mod_base = OTHER; note = 2'-O-methyladenosine
  modified_base 13: mod_base = um
  modified_base 14: mod_base = gm
  modified_base 15: mod_base = um
  modified_base 16: mod_base = OTHER; note = 2'-O-methyladenosine
  modified_base 17: mod_base = OTHER; note = 2'-O-methyladenosine
  modified_base 18: mod_base = OTHER; note = 2'-O-methyladenosine
  modified_base 19: mod_base = cm
  modified_base 20: mod_base = um
  modified_base 21: mod_base = um
  source 1..21: mol_type = other RNA
gcataatcaggatgtaaactt

SEQ ID NO: 803 - RNA, 21 nt, synthetic construct
  modified_base 1: mod_base = cm
  modified_base 2: mod_base = OTHER; note = 2-aminoadenosine
  modified_base 3: mod_base = um
  modified_base 4: mod_base = OTHER; note = 2'-O-methyladenosine
  modified_base 5: mod_base = OTHER; note = 2'-O-methyladenosine
  modified_base 6: mod_base = um
  modified_base 7: mod_base = cm
  modified_base 8: mod_base = OTHER; note = 2'-O-methyladenosine
  modified_base 9: mod_base = OTHER; note = 2'-fluoroguanosine
  modified_base 10: mod_base = OTHER; note = 2'-fluoroguanosine
  modified_base 11: mod_base = OTHER; note = 2'-fluoroadenosine
  modified_base 12: mod_base = um
  modified_base 13: mod_base = gm
  modified_base 14: mod_base = um
  modified_base 15: mod_base = OTHER; note = 2'-O-methyladenosine
  modified_base 16: mod_base = OTHER; note = 2'-O-methyladenosine
  modified_base 17: mod_base = OTHER; note = 2'-O-methyladenosine
  modified_base 18: mod_base = cm
  modified_base 19: mod_base = um
  modified_base 20: mod_base = um
  modified_base 21: mod_base = OTHER; note = 2'-O-methyladenosine
  source 1..21: mol_type = other RNA
cataatcaggatgtaaactta

SEQ ID NO: 804 - RNA, 21 nt, synthetic construct
  modified_base 1: mod_base = gm
  modified_base 2: mod_base = gm
  modified_base 3: mod_base = OTHER; note = 2'-O-methyladenosine
  modified_base 4: mod_base = um
  modified_base 5: mod_base = gm
  modified_base 6: mod_base = um
  modified_base 7: mod_base = OTHER; note = 2'-O-methyladenosine
  modified_base 8: mod_base = OTHER; note = 2'-O-methyladenosine
  modified_base 9: mod_base = OTHER; note = 2'-fluoroadenosine
  modified_base 10: mod_base = OTHER; note = 2'-fluorocytidine
  modified_base 11: mod_base = OTHER; note = 2'-fluorouridine
  modified_base 12: mod_base = um
  modified_base 13: mod_base = OTHER; note = 2'-O-methyladenosine
  modified_base 14: mod_base = cm
  modified_base 15: mod_base = OTHER; note = 2'-O-methyladenosine
  modified_base 16: mod_base = um
  modified_base 17: mod_base = OTHER; note = 2'-O-methyladenosine
  modified_base 18: mod_base = gm
  modified_base 19: mod_base = cm
  modified_base 20: mod_base = um
  modified_base 21: mod_base = OTHER; note = 2'-O-methyladenosine
  source 1..21: mol_type = other RNA
ggatgtaaacttacatagcta

SEQ ID NO: 805 - RNA, 21 nt, synthetic construct
  modified_base 1: mod_base = gm
  modified_base 2: mod_base = gm
  modified_base 3: mod_base = um
  modified_base 4: mod_base = OTHER; note = 2'-O-methyladenosine
  modified_base 5: mod_base = OTHER; note = 2'-O-methyladenosine
  modified_base 6: mod_base = gm
  modified_base 7: mod_base = gm
  modified_base 8: mod_base = cm
  modified_base 9: mod_base = OTHER; note = 2'-fluorouridine
  modified_base 10: mod_base = OTHER; note = 2'-fluoroadenosine
  modified_base 11: mod_base = OTHER; note = 2'-fluoroguanosine
  modified_base 12: mod_base = OTHER; note = 2'-O-methyladenosine
  modified_base 13: mod_base = cm
  modified_base 14: mod_base = um
  modified_base 15: mod_base = um
  modified_base 16: mod_base = um
  modified_base 17: mod_base = OTHER; note = 2'-O-methyladenosine
  modified_base 18: mod_base = um
  modified_base 19: mod_base = um
  modified_base 20: mod_base = OTHER; note = 2-aminoadenosine
  modified_base 21: mod_base = um
  source 1..21: mol_type = other RNA
ggtaaggctagactttattat

SEQ ID NO: 806 - RNA, 21 nt, synthetic construct
  modified_base 1: mod_base = um
  modified_base 2: mod_base = gm
  modified_base 3: mod_base = gm
  modified_base 4: mod_base = um
  modified_base 5: mod_base = gm
  modified_base 6: mod_base = um
  modified_base 7: mod_base = cm
  modified_base 8: mod_base = um
  modified_base 9: mod_base = OTHER; note = 2'-fluorocytidine
  modified_base 10: mod_base = OTHER; note = 2'-fluorouridine
  modified_base 11: mod_base = OTHER; note = 2'-fluoroadenosine
  modified_base 12: mod_base = um
  modified_base 13: mod_base = cm
  modified_base 14: mod_base = um
  modified_base 15: mod_base = gm
  modified_base 16: mod_base = um
  modified_base 17: mod_base = OTHER; note = 2'-O-methyladenosine
  modified_base 18: mod_base = gm
  modified_base 19: mod_base = um
  modified_base 20: mod_base = OTHER; note = 2'-O-methyladenosine
  modified_base 21: mod_base = OTHER; note = 2'-O-methyladenosine
  source 1..21: mol_type = other RNA
tggtgtctctatctgtagtaa

SEQ ID NO: 807 - RNA, 21 nt, synthetic construct
  modified_base 1: mod_base = gm
  modified_base 2: mod_base = um
  modified_base 3: mod_base = cm
  modified_base 4: mod_base = um
  modified_base 5: mod_base = cm
  modified_base 6: mod_base = um
  modified_base 7: mod_base = OTHER; note = 2'-O-methyladenosine
  modified_base 8: mod_base = um
  modified_base 9: mod_base = OTHER; note = 2'-fluorocytidine
  modified_base 10: mod_base = OTHER; note = 2'-fluorouridine
  modified_base 11: mod_base = OTHER; note = 2'-fluoroguanosine
  modified_base 12: mod_base = um
  modified_base 13: mod_base = OTHER; note = 2'-O-methyladenosine
  modified_base 14: mod_base = gm
  modified_base 15: mod_base = um
  modified_base 16: mod_base = OTHER; note = 2'-O-methyladenosine
  modified_base 17: mod_base = cm
  modified_base 18: mod_base = um
  modified_base 19: mod_base = OTHER; note = 2'-O-methyladenosine
  modified_base 20: mod_base = um
  modified_base 21: mod_base = OTHER; note = 2'-O-methyladenosine
  source 1..21: mol_type = other RNA
gtctctatctgtagtactata

SEQ ID NO: 808 - RNA, 21 nt, synthetic construct
  modified_base 1: mod_base = gm
  modified_base 2: mod_base = cm
  modified_base 3: mod_base = um
  modified_base 4: mod_base = cm
  modified_base 5: mod_base = um
  modified_base 6: mod_base = OTHER; note = 2'-O-methyladenosine
  modified_base 7: mod_base = um
  modified_base 8: mod_base = cm
  modified_base 9: mod_base = OTHER; note = 2'-fluorouridine
  modified_base 10: mod_base = OTHER; note = 2'-fluoroguanosine
  modified_base 11: mod_base = OTHER; note = 2'-fluorouridine
  modified_base 12: mod_base = OTHER; note = 2'-O-methyladenosine
  modified_base 13: mod_base = gm
  modified_base 14: mod_base = um
  modified_base 15: mod_base = OTHER; note = 2'-O-methyladenosine
  modified_base 16: mod_base = cm
  modified_base 17: mod_base = um
  modified_base 18: mod_base = OTHER; note = 2'-O-methyladenosine
  modified_base 19: mod_base = um
  modified_base 20: mod_base = gm
  modified_base 21: mod_base = OTHER; note = 2'-O-methyladenosine
  source 1..21: mol_type = other RNA
gctctatctgtagtactatga

SEQ ID NO: 809 - RNA, 21 nt, synthetic construct
  modified_base 1: mod_base = gm
  modified_base 2: mod_base = cm
  modified_base 3: mod_base = um
  modified_base 4: mod_base = OTHER; note = 2'-O-methyladenosine
  modified_base 5: mod_base = um
  modified_base 6: mod_base = cm
  modified_base 7: mod_base = um
  modified_base 8: mod_base = gm
  modified_base 9: mod_base = OTHER; note = 2'-fluorouridine
  modified_base 10: mod_base = OTHER; note = 2'-fluoroadenosine
  modified_base 11: mod_base = OTHER; note = 2'-fluoroguanosine
  modified_base 12: mod_base = um
  modified_base 13: mod_base = OTHER; note = 2'-O-methyladenosine
  modified_base 14: mod_base = cm
  modified_base 15: mod_base = um
  modified_base 16: mod_base = OTHER; note = 2'-O-methyladenosine
  modified_base 17: mod_base = um
  modified_base 18: mod_base = gm
  modified_base 19: mod_base = OTHER; note = 2'-O-methyladenosine
  modified_base 20: mod_base = cm
  modified_base 21: mod_base = OTHER; note = 2'-O-methyladenosine
  source 1..21: mol_type = other RNA
gctatctgtagtactatgaca

SEQ ID NO: 810 - RNA, 21 nt, synthetic construct
  modified_base 1: mod_base = gm
  modified_base 2: mod_base = um
  modified_base 3: mod_base = cm
  modified_base 4: mod_base = um
  modified_base 5: mod_base = OTHER; note = 2'-O-methyladenosine
  modified_base 6: mod_base = gm
  modified_base 7: mod_base = cm
  modified_base 8: mod_base = OTHER; note = 2'-O-methyladenosine
  modified_base 9: mod_base = OTHER; note = 2'-fluoroadenosine
  modified_base 10: mod_base = OTHER; note = 2'-fluorouridine
  modified_base 11: mod_base = OTHER; note = 2'-fluoroguanosine
  modified_base 12: mod_base = um
  modified_base 13: mod_base = um
  modified_base 14: mod_base = gm
  modified_base 15: mod_base = cm
  modified_base 16: mod_base = OTHER; note = 2'-O-methyladenosine
  modified_base 17: mod_base = OTHER; note = 2'-O-methyladenosine
  modified_base 18: mod_base = OTHER; note = 2-aminoadenosine
  modified_base 19: mod_base = um
  modified_base 20: mod_base = um
  modified_base 21: mod_base = OTHER; note = 2'-O-methyladenosine
  source 1..21: mol_type = other RNA
gtctagcaatgttgcaaatta

SEQ ID NO: 811 - RNA, 21 nt, synthetic construct
  modified_base 1: mod_base = gm
  modified_base 2: mod_base = OTHER; note = 2-aminoadenosine
  modified_base 3: mod_base = OTHER; note = 2'-O-methyladenosine
  modified_base 4: mod_base = gm
  modified_base 5: mod_base = OTHER; note = 2'-O-methyladenosine
  modified_base 6: mod_base = cm
  modified_base 7: mod_base = um
  modified_base 8: mod_base = cm
  modified_base 9: mod_base = OTHER; note = 2'-fluoroadenosine
  modified_base 10: mod_base = OTHER; note = 2'-fluorouridine
  modified_base 11: mod_base = OTHER; note = 2'-fluorocytidine
  modified_base 12: mod_base = um
  modified_base 13: mod_base = cm
  modified_base 14: mod_base = um
  modified_base 15: mod_base = OTHER; note = 2'-O-methyladenosine
  modified_base 16: mod_base = um
  modified_base 17: mod_base = gm
  modified_base 18: mod_base = OTHER; note = 2'-O-methyladenosine
  modified_base 19: mod_base = um
  modified_base 20: mod_base = gm
  modified_base 21: mod_base = OTHER; note = 2'-O-methyladenosine
  source 1..21: mol_type = other RNA
gaagactcatctctatgatga

SEQ ID NO: 812 - RNA, 21 nt, synthetic construct
  modified_base 1: mod_base = gm
  modified_base 2: mod_base = um
  modified_base 3: mod_base = gm
  modified_base 4: mod_base = gm
  modified_base 5: mod_base = OTHER; note = 2'-O-methyladenosine
  modified_base 6: mod_base = gm
  modified_base 7: mod_base = um
  modified_base 8: mod_base = cm
  modified_base 9: mod_base = OTHER; note = 2'-fluoroadenosine
  modified_base 10: mod_base = OTHER; note = 2'-fluorocytidine
  modified_base 11: mod_base = OTHER; note = 2'-fluoroadenosine
  modified_base 12: mod_base = um
  modified_base 13: mod_base = um
  modified_base 14: mod_base = OTHER; note = 2'-O-methyladenosine
  modified_base 15: mod_base = OTHER; note = 2'-O-methyladenosine
  modified_base 16: mod_base = um
  modified_base 17: mod_base = um
  modified_base 18: mod_base = gm
  modified_base 19: mod_base = gm
  modified_base 20: mod_base = OTHER; note = 2'-O-methyladenosine
  modified_base 21: mod_base = OTHER; note = 2'-O-methyladenosine
  source 1..21: mol_type = other RNA
gtggagtcacattaattggaa

SEQ ID NO: 813 - RNA, 21 nt, synthetic construct
  modified_base 1: mod_base = gm
  modified_base 2: mod_base = gm
  modified_base 3: mod_base = OTHER; note = 2'-O-methyladenosine
  modified_base 4: mod_base = um
  modified_base 5: mod_base = gm
  modified_base 6: mod_base = OTHER; note = 2'-O-methyladenosine
  modified_base 7: mod_base = gm
  modified_base 8: mod_base = um
  modified_base 9: mod_base = OTHER; note = 2'-fluoroadenosine
  modified_base 10: mod_base = OTHER; note = 2'-fluorocytidine
  modified_base 11: mod_base = OTHER; note = 2'-fluoroguanosine
  modified_base 12: mod_base = OTHER; note = 2'-O-methyladenosine
  modified_base 13: mod_base = OTHER; note = 2'-O-methyladenosine
  modified_base 14: mod_base = cm
  modified_base 15: mod_base = um
  modified_base 16: mod_base = um
  modified_base 17: mod_base = OTHER; note = 2'-O-methyladenosine
  modified_base 18: mod_base = um
  modified_base 19: mod_base = gm
  modified_base 20: mod_base = um
  modified_base 21: mod_base = OTHER; note = 2'-O-methyladenosine
  source 1..21: mol_type = other RNA
ggatgagtacgaacttatgta

SEQ ID NO: 814 - RNA, 21 nt, synthetic construct
  modified_base 1: mod_base = OTHER; note = 2'-O-methyladenosine
  modified_base 2: mod_base = cm
  modified_base 3: mod_base = gm
  modified_base 4: mod_base = OTHER; note = 2'-O-methyladenosine
  modified_base 5: mod_base = OTHER; note = 2'-O-methyladenosine
  modified_base 6: mod_base = cm
  modified_base 7: mod_base = um
  modified_base 8: mod_base = um
  modified_base 9: mod_base = OTHER; note = 2'-fluoroadenosine
  modified_base 10: mod_base = OTHER; note = 2'-fluorouridine
  modified_base 11: mod_base = OTHER; note = 2'-fluoroguanosine
  modified_base 12: mod_base = um
  modified_base 13: mod_base = OTHER; note = 2'-O-methyladenosine
  modified_base 14: mod_base = cm
  modified_base 15: mod_base = um
  modified_base 16: mod_base = cm
  modified_base 17: mod_base = OTHER; note = 2'-O-methyladenosine
  modified_base 18: mod_base = um
  modified_base 19: mod_base = um
  modified_base 20: mod_base = cm
  modified_base 21: mod_base = OTHER; note = 2'-O-methyladenosine
  source 1..21: mol_type = other RNA
acgaacttatgtactcattca

SEQ ID NO: 815 - RNA, 21 nt, synthetic construct
  modified_base 1: mod_base = cm
  modified_base 2: mod_base = gm
  modified_base 3: mod_base = OTHER; note = 2'-O-methyladenosine
  modified_base 4: mod_base = OTHER; note = 2'-O-methyladenosine
  modified_base 5: mod_base = cm
  modified_base 6: mod_base = um
  modified_base 7: mod_base = um
  modified_base 8: mod_base = OTHER; note = 2'-O-methyladenosine
  modified_base 9: mod_base = OTHER; note = 2'-fluorouridine
  modified_base 10: mod_base = OTHER; note = 2'-fluoroguanosine
  modified_base 11: mod_base = OTHER; note = 2'-fluorouridine
  modified_base 12: mod_base = OTHER; note = 2'-O-methyladenosine
  modified_base 13: mod_base = cm
  modified_base 14: mod_base = um
  modified_base 15: mod_base = cm
  modified_base 16: mod_base = OTHER; note = 2'-O-methyladenosine
  modified_base 17: mod_base = um
  modified_base 18: mod_base = um
  modified_base 19: mod_base = cm
  modified_base 20: mod_base = gm
  modified_base 21: mod_base = um
  source 1..21: mol_type = other RNA
cgaacttatgtactcattcgt

SEQ ID NO: 816 - RNA, 21 nt, synthetic construct
  modified_base 1: mod_base = cm
  modified_base 2: mod_base = um
  modified_base 3: mod_base = um
  modified_base 4: mod_base = OTHER; note = 2'-O-methyladenosine
  modified_base 5: mod_base = um
  modified_base 6: mod_base = gm
  modified_base 7: mod_base = um
  modified_base 8: mod_base = OTHER; note = 2'-O-methyladenosine
  modified_base 9: mod_base = OTHER; note = 2'-fluorocytidine
  modified_base 10: mod_base = OTHER; note = 2'-fluorouridine
  modified_base 11: mod_base = OTHER; note = 2'-fluorocytidine
  modified_base 12: mod_base = OTHER; note = 2'-O-methyladenosine
  modified_base 13: mod_base = um
  modified_base 14: mod_base = um
  modified_base 15: mod_base = cm
  modified_base 16: mod_base = gm
  modified_base 17: mod_base = um
  modified_base 18: mod_base = um
  modified_base 19: mod_base = um
  modified_base 20: mod_base = cm
  modified_base 21: mod_base = OTHER; note = 2'-O-methyladenosine
  source 1..21: mol_type = other RNA
cttatgtactcattcgtttca

SEQ ID NO: 817 - RNA, 21 nt, synthetic construct
  modified_base 1: mod_base = cm
  modified_base 2: mod_base = um
  modified_base 3: mod_base = um
  modified_base 4: mod_base = OTHER; note = 2'-O-methyladenosine
  modified_base 5: mod_base = um
  modified_base 6: mod_base = gm
  modified_base 7: mod_base = um
  modified_base 8: mod_base = OTHER; note = 2'-O-methyladenosine
  modified_base 9: mod_base = OTHER; note = 2'-fluorocytidine
  modified_base 10: mod_base = OTHER; note = 2'-fluorouridine
  modified_base 11: mod_base = OTHER; note = 2'-fluorocytidine
  modified_base 12: mod_base = OTHER; note = 2'-O-methyladenosine
  modified_base 13: mod_base = um
  modified_base 14: mod_base = um
  modified_base 15: mod_base = cm
  modified_base 16: mod_base = OTHER; note = 2 -O-methylinosine
  modified_base 17: mod_base = um
  modified_base 18: mod_base = um
  modified_base 19: mod_base = um
  modified_base 20: mod_base = cm
  modified_base 21: mod_base = OTHER; note = 2'-O-methyladenosine
  source 1..21: mol_type = other RNA
cttatgtactcattcntttca

SEQ ID NO: 818 - RNA, 21 nt, synthetic construct
  modified_base 1: mod_base = gm
  modified_base 2: mod_base = um
  modified_base 3: mod_base = OTHER; note = 2'-O-methyladenosine
  modified_base 4: mod_base = gm
  modified_base 5: mod_base = um
  modified_base 6: mod_base = um
  modified_base 7: mod_base = OTHER; note = 2'-O-methyladenosine
  modified_base 8: mod_base = OTHER; note = 2'-O-methyladenosine
  modified_base 9: mod_base = OTHER; note = 2'-fluorouridine
  modified_base 10: mod_base = OTHER; note = 2'-fluoroadenosine
  modified_base 11: mod_base = OTHER; note = 2'-fluoroguanosine
  modified_base 12: mod_base = cm
  modified_base 13: mod_base = gm
  modified_base 14: mod_base = um
  modified_base 15: mod_base = OTHER; note = 2'-O-methyladenosine
  modified_base 16: mod_base = cm
  modified_base 17: mod_base = um
  modified_base 18: mod_base = um
  modified_base 19: mod_base = cm
  modified_base 20: mod_base = um
  modified_base 21: mod_base = um
  source 1..21: mol_type = other RNA
gtagttaatagcgtacttctt

SEQ ID NO: 819 - RNA, 21 nt, synthetic construct
  modified_base 1: mod_base = gm
  modified_base 2: mod_base = cm
  modified_base 3: mod_base = um
  modified_base 4: mod_base = um
  modified_base 5: mod_base = gm
  modified_base 6: mod_base = cm
  modified_base 7: mod_base = um
  modified_base 8: mod_base = um
  modified_base 9: mod_base = OTHER; note = 2'-fluorouridine
  modified_base 10: mod_base = OTHER; note = 2'-fluorocytidine
  modified_base 11: mod_base = OTHER; note = 2'-fluoroguanosine
  modified_base 12: mod_base = um
  modified_base 13: mod_base = gm
  modified_base 14: mod_base = gm
  modified_base 15: mod_base = um
  modified_base 16: mod_base = OTHER; note = 2'-O-methyladenosine
  modified_base 17: mod_base = um
  modified_base 18: mod_base = um
  modified_base 19: mod_base = cm
  modified_base 20: mod_base = um
  modified_base 21: mod_base = um
  source 1..21: mol_type = other RNA
gcttgctttcgtggtattctt

SEQ ID NO: 820 - RNA, 21 nt, synthetic construct
  modified_base 1: mod_base = gm
  modified_base 2: mod_base = um
  modified_base 3: mod_base = OTHER; note = 2'-O-methyladenosine
  modified_base 4: mod_base = cm
  modified_base 5: mod_base = OTHER; note = 2'-O-methyladenosine
  modified_base 6: mod_base = cm
  modified_base 7: mod_base = um
  modified_base 8: mod_base = OTHER; note = 2'-O-methyladenosine
  modified_base 9: mod_base = OTHER; note = 2'-fluoroguanosine
  modified_base 10: mod_base = OTHER; note = 2'-fluorocytidine
  modified_base 11: mod_base = OTHER; note = 2'-fluorocytidine
  modified_base 12: mod_base = OTHER; note = 2'-O-methyladenosine
  modified_base 13: mod_base = um
  modified_base 14: mod_base = cm
  modified_base 15: mod_base = cm
  modified_base 16: mod_base = um
  modified_base 17: mod_base = um
  modified_base 18: mod_base = OTHER; note = 2'-O-methyladenosine
  modified_base 19: mod_base = cm
  modified_base 20: mod_base = um
  modified_base 21: mod_base = OTHER; note = 2'-O-methyladenosine
  source 1..21: mol_type = other RNA
gtacactagccatccttacta

SEQ ID NO: 821 - RNA, 21 nt, synthetic construct
  modified_base 1: mod_base = gm
  modified_base 2: mod_base = um
  modified_base 3: mod_base = OTHER; note = 2'-O-methyladenosine
  modified_base 4: mod_base = cm
  modified_base 5: mod_base = um
  modified_base 6: mod_base = gm
  modified_base 7: mod_base = cm
  modified_base 8: mod_base = um
  modified_base 9: mod_base = OTHER; note = 2'-fluoroguanosine
  modified_base 10: mod_base = OTHER; note = 2'-fluorocytidine
  modified_base 11: mod_base = OTHER; note = 2'-fluoroadenosine
  modified_base 12: mod_base = OTHER; note = 2'-O-methyladenosine
  modified_base 13: mod_base = um
  modified_base 14: mod_base = OTHER; note = 2'-O-methyladenosine
  modified_base 15: mod_base = um
  modified_base 16: mod_base = um
  modified_base 17: mod_base = gm
  modified_base 18: mod_base = um
  modified_base 19: mod_base = um
  modified_base 20: mod_base = OTHER; note = 2'-O-methyladenosine
  modified_base 21: mod_base = OTHER; note = 2'-O-methyladenosine
  source 1..21: mol_type = other RNA
gtactgctgcaatattgttaa

SEQ ID NO: 822 - RNA, 21 nt, synthetic construct
  modified_base 1: mod_base = cm
  modified_base 2: mod_base = um
  modified_base 3: mod_base = gm
  modified_base 4: mod_base = cm
  modified_base 5: mod_base = um
  modified_base 6: mod_base = gm
  modified_base 7: mod_base = cm
  modified_base 8: mod_base = OTHER; note = 2'-O-methyladenosine
  modified_base 9: mod_base = OTHER; note = 2'-fluoroadenosine
  modified_base 10: mod_base = OTHER; note = 2'-fluorouridine
  modified_base 11: mod_base = OTHER; note = 2'-fluoroadenosine
  modified_base 12: mod_base = um
  modified_base 13: mod_base = um
  modified_base 14: mod_base = gm
  modified_base 15: mod_base = um
  modified_base 16: mod_base = um
  modified_base 17: mod_base = OTHER; note = 2'-O-methyladenosine
  modified_base 18: mod_base = OTHER; note = 2'-O-methyladenosine
  modified_base 19: mod_base = cm
  modified_base 20: mod_base = gm
  modified_base 21: mod_base = um
  source 1..21: mol_type = other RNA
ctgctgcaatattgttaacgt

SEQ ID NO: 823 - RNA, 21 nt, synthetic construct
  modified_base 1: mod_base = um
  modified_base 2: mod_base = gm
  modified_base 3: mod_base = cm
  modified_base 4: mod_base = um
  modified_base 5: mod_base = gm
  modified_base 6: mod_base = cm
  modified_base 7: mod_base = OTHER; note = 2'-O-methyladenosine
  modified_base 8: mod_base = OTHER; note = 2'-O-methyladenosine
  modified_base 9: mod_base = OTHER; note = 2'-fluorouridine
  modified_base 10: mod_base = OTHER; note = 2'-fluoroadenosine
  modified_base 11: mod_base = OTHER; note = 2'-fluorouridine
  modified_base 12: mod_base = um
  modified_base 13: mod_base = gm
  modified_base 14: mod_base = um
  modified_base 15: mod_base = um
  modified_base 16: mod_base = OTHER; note = 2'-O-methyladenosine
  modified_base 17: mod_base = OTHER; note = 2'-O-methyladenosine
  modified_base 18: mod_base = cm
  modified_base 19: mod_base = gm
  modified_base 20: mod_base = um
  modified_base 21: mod_base = OTHER; note = 2'-O-methyladenosine
  source 1..21: mol_type = other RNA
tgctgcaatattgttaacgta

SEQ ID NO: 824 - RNA, 21 nt, synthetic construct
  modified_base 1: mod_base = um
  modified_base 2: mod_base = gm
  modified_base 3: mod_base = cm
  modified_base 4: mod_base = um
  modified_base 5: mod_base = gm
  modified_base 6: mod_base = cm
  modified_base 7: mod_base = OTHER; note = 2'-O-methyladenosine
  modified_base 8: mod_base = OTHER; note = 2'-O-methyladenosine
  modified_base 9: mod_base = OTHER; note = 2'-fluorouridine
  modified_base 10: mod_base = OTHER; note = 2-aminoadenosine
  modified_base 11: mod_base = OTHER; note = 2'-fluorouridine
  modified_base 12: mod_base = um
  modified_base 13: mod_base = gm
  modified_base 14: mod_base = um
  modified_base 15: mod_base = um
  modified_base 16: mod_base = OTHER; note = 2'-O-methyladenosine
  modified_base 17: mod_base = OTHER; note = 2'-O-methyladenosine
  modified_base 18: mod_base = cm
  modified_base 19: mod_base = gm
  modified_base 20: mod_base = um
  modified_base 21: mod_base = OTHER; note = 2'-O-methyladenosine
  source 1..21: mol_type = other RNA
tgctgcaatattgttaacgta

SEQ ID NO: 825 - RNA, 21 nt, synthetic construct
  modified_base 1: mod_base = cm
  modified_base 2: mod_base = cm
  modified_base 3: mod_base = um
  modified_base 4: mod_base = gm
  modified_base 5: mod_base = OTHER; note = 2'-O-methyladenosine
  modified_base 6: mod_base = um
  modified_base 7: mod_base = cm
  modified_base 8: mod_base = um
  modified_base 9: mod_base = OTHER; note = 2'-fluorouridine
  modified_base 10: mod_base = OTHER; note = 2'-fluorocytidine
  modified_base 11: mod_base = OTHER; note = 2'-fluorouridine
  modified_base 12: mod_base = gm
  modified_base 13: mod_base = gm
  modified_base 14: mod_base = um
  modified_base 15: mod_base = cm
  modified_base 16: mod_base = um
  modified_base 17: mod_base = OTHER; note = 2'-O-methyladenosine
  modified_base 18: mod_base = OTHER; note = 2'-O-methyladenosine
  modified_base 19: mod_base = OTHER; note = 2'-O-methyladenosine
  modified_base 20: mod_base = cm
  modified_base 21: mod_base = OTHER; note = 2'-O-methyladenosine
  source 1..21: mol_type = other RNA
cctgatcttctggtctaaaca

SEQ ID NO: 826 - RNA, 21 nt, synthetic construct
  modified_base 1: mod_base = cm
  modified_base 2: mod_base = OTHER; note = 2'-O-methyladenosine
  modified_base 3: mod_base = um
  modified_base 4: mod_base = cm
  modified_base 5: mod_base = OTHER; note = 2'-O-methyladenosine
  modified_base 6: mod_base = cm
  modified_base 7: mod_base = gm
  modified_base 8: mod_base = OTHER; note = 2'-O-methyladenosine
  modified_base 9: mod_base = OTHER; note = 2'-fluoroadenosine
  modified_base 10: mod_base = OTHER; note = 2'-fluorocytidine
  modified_base 11: mod_base = OTHER; note = 2'-fluoroguanosine
  modified_base 12: mod_base = cm
  modified_base 13: mod_base = um
  modified_base 14: mod_base = um
  modified_base 15: mod_base = um
  modified_base 16: mod_base = cm
  modified_base 17: mod_base = um
  modified_base 18: mod_base = um
  modified_base 19: mod_base = OTHER; note = 2'-O-methyladenosine
  modified_base 20: mod_base = um
  modified_base 21: mod_base = um
  source 1..21: mol_type = other RNA
catcacgaacgctttcttatt

SEQ ID NO: 827 - RNA, 21 nt, synthetic construct
  modified_base 1: mod_base = cm
  modified_base 2: mod_base = OTHER; note = 2'-O-methyladenosine
  modified_base 3: mod_base = um
  modified_base 4: mod_base = cm
  modified_base 5: mod_base = OTHER; note = 2'-O-methyladenosine
  modified_base 6: mod_base = cm
  modified_base 7: mod_base = gm
  modified_base 8: mod_base = OTHER; note = 2'-O-methyladenosine
  modified_base 9: mod_base = OTHER; note = 2'-fluoroadenosine
  modified_base 10: mod_base = OTHER; note = 2'-fluorocytidine
  modified_base 11: mod_base = OTHER; note = 2'-fluoroguanosine
  modified_base 12: mod_base = cm
  modified_base 13: mod_base = um
  modified_base 14: mod_base = um
  modified_base 15: mod_base = um
  modified_base 16: mod_base = cm
  modified_base 17: mod_base = um
  modified_base 18: mod_base = um
  modified_base 19: mod_base = OTHER; note = 2-aminoadenosine
  modified_base 20: mod_base = um
  modified_base 21: mod_base = um
  source 1..21: mol_type = other RNA
catcacgaacgctttcttatt

SEQ ID NO: 828 - RNA, 21 nt, synthetic construct
  modified_base 1: mod_base = cm
  modified_base 2: mod_base = gm
  modified_base 3: mod_base = OTHER; note = 2'-O-methyladenosine
  modified_base 4: mod_base = OTHER; note = 2'-O-methyladenosine
  modified_base 5: mod_base = cm
  modified_base 6: mod_base = gm
  modified_base 7: mod_base = cm
  modified_base 8: mod_base = um
  modified_base 9: mod_base = OTHER; note = 2'-fluorouridine
  modified_base 10: mod_base = OTHER; note = 2'-fluorouridine
  modified_base 11: mod_base = OTHER; note = 2'-fluorocytidine
  modified_base 12: mod_base = um
  modified_base 13: mod_base = um
  modified_base 14: mod_base = OTHER; note = 2'-O-methyladenosine
  modified_base 15: mod_base = um
  modified_base 16: mod_base = um
  modified_base 17: mod_base = OTHER; note = 2'-O-methyladenosine
  modified_base 18: mod_base = cm
  modified_base 19: mod_base = OTHER; note = 2'-O-methyladenosine
  modified_base 20: mod_base = OTHER; note = 2'-O-methyladenosine
  modified_base 21: mod_base = OTHER; note = 2'-O-methyladenosine
  source 1..21: mol_type = other RNA
cgaacgctttcttattacaaa

SEQ ID NO: 829 - RNA, 21 nt, synthetic construct
  modified_base 1: mod_base = gm
  modified_base 2: mod_base = OTHER; note = 2'-O-methyladenosine
  modified_base 3: mod_base = cm
  modified_base 4: mod_base = OTHER; note = 2'-O-methyladenosine
  modified_base 5: mod_base = gm
  modified_base 6: mod_base = um
  modified_base 7: mod_base = OTHER; note = 2'-O-methyladenosine
  modified_base 8: mod_base = OTHER; note = 2'-O-methyladenosine
  modified_base 9: mod_base = OTHER; note = 2'-fluoroguanosine
  modified_base 10: mod_base = OTHER; note = 2'-fluorouridine
  modified_base 11: mod_base = OTHER; note = 2'-fluoroguanosine
  modified_base 12: mod_base = OTHER; note = 2'-O-methyladenosine
  modified_base 13: mod_base = cm
  modified_base 14: mod_base = OTHER; note = 2'-O-methyladenosine
  modified_base 15: mod_base = OTHER; note = 2'-O-methyladenosine
  modified_base 16: mod_base = cm
  modified_base 17: mod_base = OTHER; note = 2'-O-methyladenosine
  modified_base 18: mod_base = gm
  modified_base 19: mod_base = OTHER; note = 2'-O-methyladenosine
  modified_base 20: mod_base = um
  modified_base 21: mod_base = OTHER; note = 2'-O-methyladenosine
  source 1..21: mol_type = other RNA
gacagtaagtgacaacagata

SEQ ID NO: 830 - RNA, 21 nt, synthetic construct
  modified_base 1: mod_base = cm
  modified_base 2: mod_base = OTHER; note = 2'-O-methyladenosine
  modified_base 3: mod_base = gm
  modified_base 4: mod_base = um
  modified_base 5: mod_base = OTHER; note = 2'-O-methyladenosine
  modified_base 6: mod_base = OTHER; note = 2'-O-methyladenosine
  modified_base 7: mod_base = gm
  modified_base 8: mod_base = um
  modified_base 9: mod_base = OTHER; note = 2'-fluoroguanosine
  modified_base 10: mod_base = OTHER; note = 2'-fluoroadenosine
  modified_base 11: mod_base = OTHER; note = 2'-fluorocytidine
  modified_base 12: mod_base = OTHER; note = 2'-O-methyladenosine
  modified_base 13: mod_base = OTHER; note = 2'-O-methyladenosine
  modified_base 14: mod_base = cm
  modified_base 15: mod_base = OTHER; note = 2'-O-methyladenosine
  modified_base 16: mod_base = gm
  modified_base 17: mod_base = OTHER; note = 2'-O-methyladenosine
  modified_base 18: mod_base = um
  modified_base 19: mod_base = gm
  modified_base 20: mod_base = um
  modified_base 21: mod_base = um
  source 1..21: mol_type = other RNA
cagtaagtgacaacagatgtt

SEQ ID NO: 831 - RNA, 21 nt, synthetic construct
  modified_base 1: mod_base = cm
  modified_base 2: mod_base = OTHER; note = 2-aminoadenosine
  modified_base 3: mod_base = OTHER; note = 2'-O-methyladenosine
  modified_base 4: mod_base = OTHER; note = 2'-O-methyladenosine
  modified_base 5: mod_base = um
  modified_base 6: mod_base = um
  modified_base 7: mod_base = gm
  modified_base 8: mod_base = gm
  modified_base 9: mod_base = OTHER; note = 2'-fluoroadenosine
  modified_base 10: mod_base = OTHER; note = 2'-fluorouridine
  modified_base 11: mod_base = OTHER; note = 2'-fluoroguanosine
  modified_base 12: mod_base = OTHER; note = 2'-O-methyladenosine
  modified_base 13: mod_base = cm
  modified_base 14: mod_base = OTHER; note = 2'-O-methyladenosine
  modified_base 15: mod_base = OTHER; note = 2'-O-methyladenosine
  modified_base 16: mod_base = OTHER; note = 2'-O-methyladenosine
  modified_base 17: mod_base = gm
  modified_base 18: mod_base = OTHER; note = 2'-O-methyladenosine
  modified_base 19: mod_base = um
  modified_base 20: mod_base = cm
  modified_base 21: mod_base = OTHER; note = 2'-O-methyladenosine
  source 1..21: mol_type = other RNA
caaattggatgacaaagatca

SEQ ID NO: 832 - RNA, 21 nt, synthetic construct
  modified_base 1: mod_base = cm
  modified_base 2: mod_base = um
  modified_base 3: mod_base = cm
  modified_base 4: mod_base = OTHER; note = 2'-O-methyladenosine
  modified_base 5: mod_base = cm
  modified_base 6: mod_base = OTHER; note = 2'-O-methyladenosine
  modified_base 7: mod_base = um
  modified_base 8: mod_base = OTHER; note = 2'-O-methyladenosine
  modified_base 9: mod_base = OTHER; note = 2'-fluoroguanosine
  modified_base 10: mod_base = OTHER; note = 2'-fluorocytidine
  modified_base 11: mod_base = OTHER; note = 2'-fluoroadenosine
  modified_base 12: mod_base = OTHER; note = 2'-O-methyladenosine
  modified_base 13: mod_base = um
  modified_base 14: mod_base = cm
  modified_base 15: mod_base = um
  modified_base 16: mod_base = um
  modified_base 17: mod_base = um
  modified_base 18: mod_base = OTHER; note = 2'-O-methyladenosine
  modified_base 19: mod_base = OTHER; note = 2-aminoadenosine
  modified_base 20: mod_base = um
  modified_base 21: mod_base = OTHER; note = 2'-O-methyladenosine
  source 1..21: mol_type = other RNA
ctcacatagcaatctttaata

SEQ ID NO: 833 - RNA, 21 nt, synthetic construct
  modified_base 1: mod_base = cm
  modified_base 2: mod_base = cm
  modified_base 3: mod_base = um
  modified_base 4: mod_base = um
  modified_base 5: mod_base = um
  modified_base 6: mod_base = um
  modified_base 7: mod_base = gm
  modified_base 8: mod_base = OTHER; note = 2'-O-methyladenosine
  modified_base 9: mod_base = OTHER; note = 2'-fluorouridine
  modified_base 10: mod_base = OTHER; note = 2'-fluoroguanosine
  modified_base 11: mod_base = OTHER; note = 2'-fluorouridine
  modified_base 12: mod_base = um
  modified_base 13: mod_base = gm
  modified_base 14: mod_base = um
  modified_base 15: mod_base = um
  modified_base 16: mod_base = OTHER; note = 2'-O-methyladenosine
  modified_base 17: mod_base = gm
  modified_base 18: mod_base = OTHER; note = 2'-O-methyladenosine
  modified_base 19: mod_base = cm
  modified_base 20: mod_base = OTHER; note = 2'-O-methyladenosine
  modified_base 21: mod_base = OTHER; note = 2'-O-methyladenosine
  source 1..21: mol_type = other RNA
ccttttgatgttgttagacaa

SEQ ID NO: 834 - RNA, 21 nt, synthetic construct
  modified_base 1: mod_base = um
  modified_base 2: mod_base = gm
  modified_base 3: mod_base = gm
  modified_base 4: mod_base = um
  modified_base 5: mod_base = OTHER; note = 2'-O-methyladenosine
  modified_base 6: mod_base = OTHER; note = 2'-O-methyladenosine
  modified_base 7: mod_base = um
  modified_base 8: mod_base = gm
  modified_base 9: mod_base = OTHER; note = 2'-fluorocytidine
  modified_base 10: mod_base = OTHER; note = 2'-fluorouridine
  modified_base 11: mod_base = OTHER; note = 2'-fluorouridine
  modified_base 12: mod_base = um
  modified_base 13: mod_base = OTHER; note = 2'-O-methyladenosine
  modified_base 14: mod_base = gm
  modified_base 15: mod_base = OTHER; note = 2'-O-methyladenosine
  modified_base 16: mod_base = um
  modified_base 17: mod_base = cm
  modified_base 18: mod_base = OTHER; note = 2'-O-methyladenosine
  modified_base 19: mod_base = OTHER; note = 2'-O-methyladenosine
  modified_base 20: mod_base = gm
  modified_base 21: mod_base = OTHER; note = 2'-O-methyladenosine
  source 1..21: mol_type = other RNA
tggtaatgctttagatcaaga

SEQ ID NO: 835 - RNA, 21 nt, synthetic construct
  modified_base 1: mod_base = gm
  modified_base 2: mod_base = cm
  modified_base 3: mod_base = OTHER; note = 2'-O-methyladenosine
  modified_base 4: mod_base = um
  modified_base 5: mod_base = OTHER; note = 2'-O-methyladenosine
  modified_base 6: mod_base = cm
  modified_base 7: mod_base = OTHER; note = 2'-O-methyladenosine
  modified_base 8: mod_base = OTHER; note = 2'-O-methyladenosine
  modified_base 9: mod_base = OTHER; note = 2'-fluorouridine
  modified_base 10: mod_base = OTHER; note = 2'-fluoroguanosine
  modified_base 11: mod_base = OTHER; note = 2'-fluorocytidine
  modified_base 12: mod_base = um
  modified_base 13: mod_base = OTHER; note = 2'-O-methyladenosine
  modified_base 14: mod_base = gm
  modified_base 15: mod_base = um
  modified_base 16: mod_base = um
  modified_base 17: mod_base = OTHER; note = 2'-O-methyladenosine
  modified_base 18: mod_base = OTHER; note = 2'-O-methyladenosine
  modified_base 19: mod_base = OTHER; note = 2'-O-methyladenosine
  modified_base 20: mod_base = cm
  modified_base 21: mod_base = OTHER; note = 2'-O-methyladenosine
  source 1..21: mol_type = other RNA
gcatacaatgctagttaaaca

SEQ ID NO: 836 - RNA, 21 nt, synthetic construct
  modified_base 1: mod_base = cm
  modified_base 2: mod_base = OTHER; note = 2-aminoadenosine
  modified_base 3: mod_base = um
  modified_base 4: mod_base = OTHER; note = 2'-O-methyladenosine
  modified_base 5: mod_base = cm
  modified_base 6: mod_base = OTHER; note = 2'-O-methyladenosine
  modified_base 7: mod_base = OTHER; note = 2'-O-methyladenosine
  modified_base 8: mod_base = um
  modified_base 9: mod_base = OTHER; note = 2'-fluoroguanosine
  modified_base 10: mod_base = OTHER; note = 2'-fluorocytidine
  modified_base 11: mod_base = OTHER; note = 2'-fluorouridine
  modified_base 12: mod_base = OTHER; note = 2'-O-methyladenosine
  modified_base 13: mod_base = gm
  modified_base 14: mod_base = um
  modified_base 15: mod_base = um
  modified_base 16: mod_base = OTHER; note = 2'-O-methyladenosine
  modified_base 17: mod_base = OTHER; note = 2'-O-methyladenosine
  modified_base 18: mod_base = OTHER; note = 2'-O-methyladenosine
  modified_base 19: mod_base = cm
  modified_base 20: mod_base = OTHER; note = 2'-O-methyladenosine
  modified_base 21: mod_base = OTHER; note = 2'-O-methyladenosine
  source 1..21: mol_type = other RNA
catacaatgctagttaaacaa

SEQ ID NO: 837 - RNA, 21 nt, synthetic construct
  modified_base 1: mod_base = gm
  modified_base 2: mod_base = um
  modified_base 3: mod_base = gm
  modified_base 4: mod_base = cm
  modified_base 5: mod_base = OTHER; note = 2'-O-methyladenosine
  modified_base 6: mod_base = um
  modified_base 7: mod_base = OTHER; note = 2'-O-methyladenosine
  modified_base 8: mod_base = OTHER; note = 2'-O-methyladenosine
  modified_base 9: mod_base = OTHER; note = 2'-fluorouridine
  modified_base 10: mod_base = OTHER; note = 2'-fluoroguanosine
  modified_base 11: mod_base = OTHER; note = 2'-fluorouridine
  modified_base 12: mod_base = cm
  modified_base 13: mod_base = um
  modified_base 14: mod_base = gm
  modified_base 15: mod_base = OTHER; note = 2'-O-methyladenosine
  modified_base 16: mod_base = um
  modified_base 17: mod_base = OTHER; note = 2'-O-methyladenosine
  modified_base 18: mod_base = gm
  modified_base 19: mod_base = OTHER; note = 2'-O-methyladenosine
  modified_base 20: mod_base = gm
  modified_base 21: mod_base = OTHER; note = 2'-O-methyladenosine
  source 1..21: mol_type = other RNA
gtgcataatgtctgatagaga

SEQ ID NO: 838 - RNA, 21 nt, synthetic construct
  modified_base 1: mod_base = gm
  modified_base 2: mod_base = gm
  modified_base 3: mod_base = um
  modified_base 4: mod_base = cm
  modified_base 5: mod_base = gm
  modified_base 6: mod_base = OTHER; note = 2'-O-methyladenosine
  modified_base 7: mod_base = um
  modified_base 8: mod_base = um
  modified_base 9: mod_base = OTHER; note = 2'-fluorocytidine
  modified_base 10: mod_base = OTHER; note = 2'-fluoroadenosine
  modified_base 11: mod_base = OTHER; note = 2'-fluoroguanosine
  modified_base 12: mod_base = OTHER; note = 2'-O-methyladenosine
  modified_base 13: mod_base = um
  modified_base 14: mod_base = cm
  modified_base 15: mod_base = um
  modified_base 16: mod_base = um
  modified_base 17: mod_base = OTHER; note = 2'-O-methyladenosine
  modified_base 18: mod_base = OTHER; note = 2'-O-methyladenosine
  modified_base 19: mod_base = um
  modified_base 20: mod_base = gm
  modified_base 21: mod_base = OTHER; note = 2'-O-methyladenosine
  source 1..21: mol_type = other RNA
ggtcgattcagatcttaatga

SEQ ID NO: 839 - RNA, 21 nt, synthetic construct
  modified_base 1: mod_base = gm
  modified_base 2: mod_base = gm
  modified_base 3: mod_base = um
  modified_base 4: mod_base = cm
  modified_base 5: mod_base = cm
  modified_base 6: mod_base = OTHER; note = 2'-O-methyladenosine
  modified_base 7: mod_base = gm
  modified_base 8: mod_base = OTHER; note = 2'-O-methyladenosine
  modified_base 9: mod_base = OTHER; note = 2'-fluorouridine
  modified_base 10: mod_base = OTHER; note = 2'-fluoroguanosine
  modified_base 11: mod_base = OTHER; note = 2'-fluoroadenosine
  modified_base 12: mod_base = cm
  modified_base 13: mod_base = cm
  modified_base 14: mod_base = OTHER; note = 2'-O-methyladenosine
  modified_base 15: mod_base = OTHER; note = 2'-O-methyladenosine
  modified_base 16: mod_base = OTHER; note = 2'-O-methyladenosine
  modified_base 17: mod_base = um
  modified_base 18: mod_base = um
  modified_base 19: mod_base = gm
  modified_base 20: mod_base = gm
  modified_base 21: mod_base = OTHER; note = 2'-O-methyladenosine
  source 1..21: mol_type = other RNA
ggtccagatgaccaaattgga

SEQ ID NO: 840 - RNA, 21 nt, synthetic construct
  modified_base 1: mod_base = gm
  modified_base 2: mod_base = cm
  modified_base 3: mod_base = cm
  modified_base 4: mod_base = gm
  modified_base 5: mod_base = cm
  modified_base 6: mod_base = OTHER; note = 2'-O-methyladenosine
  modified_base 7: mod_base = OTHER; note = 2'-O-methyladenosine
  modified_base 8: mod_base = OTHER; note = 2'-O-methyladenosine
  modified_base 9: mod_base = OTHER; note = 2'-fluorouridine
  modified_base 10: mod_base = OTHER; note = 2'-fluorouridine
  modified_base 11: mod_base = OTHER; note = 2'-fluoroguanosine
  modified_base 12: mod_base = cm
  modified_base 13: mod_base = OTHER; note = 2'-O-methyladenosine
  modified_base 14: mod_base = cm
  modified_base 15: mod_base = OTHER; note = 2'-O-methyladenosine
  modified_base 16: mod_base = OTHER; note = 2'-O-methyladenosine
  modified_base 17: mod_base = um
  modified_base 18: mod_base = um
  modified_base 19: mod_base = um
  modified_base 20: mod_base = gm
  modified_base 21: mod_base = OTHER; note = 2'-O-methyladenosine
  source 1..21: mol_type = other RNA
gccgcaaattgcacaatttga

SEQ ID NO: 841 - RNA, 21 nt, synthetic construct
  modified_base 1: mod_base = gm
  modified_base 2: mod_base = um
  modified_base 3: mod_base = gm
  modified_base 4: mod_base = OTHER; note = 2'-O-methyladenosine
  modified_base 5: mod_base = cm
  modified_base 6: mod_base = gm
  modified_base 7: mod_base = cm
  modified_base 8: mod_base = OTHER; note = 2'-O-methyladenosine
  modified_base 9: mod_base = OTHER; note = 2'-fluorouridine
  modified_base 10: mod_base = OTHER; note = 2'-fluoroadenosine
  modified_base 11: mod_base = OTHER; note = 2'-fluorocytidine
  modified_base 12: mod_base = OTHER; note = 2'-O-methyladenosine
  modified_base 13: mod_base = OTHER; note = 2'-O-methyladenosine
  modified_base 14: mod_base = OTHER; note = 2'-O-methyladenosine
  modified_base 15: mod_base = OTHER; note = 2'-O-methyladenosine
  modified_base 16: mod_base = cm
  modified_base 17: mod_base = OTHER; note = 2'-O-methyladenosine
  modified_base 18: mod_base = um
  modified_base 19: mod_base = um
  modified_base 20: mod_base = cm
  modified_base 21: mod_base = OTHER; note = 2'-O-methyladenosine
  source 1..21: mol_type = other RNA
gtgacgcatacaaaacattca

SEQ ID NO: 842 - RNA, 21 nt, synthetic construct
  modified_base 1: mod_base = cm
  modified_base 2: mod_base = OTHER; note = 2-aminoadenosine
  modified_base 3: mod_base = OTHER; note = 2'-O-methyladenosine
  modified_base 4: mod_base = gm
  modified_base 5: mod_base = gm
  modified_base 6: mod_base = OTHER; note = 2'-O-methyladenosine
  modified_base 7: mod_base = OTHER; note = 2'-O-methyladenosine
  modified_base 8: mod_base = gm
  modified_base 9: mod_base = OTHER; note = 2'-fluoroadenosine
  modified_base 10: mod_base = OTHER; note = 2'-fluorocytidine
  modified_base 11: mod_base = OTHER; note = 2'-fluorocytidine
  modified_base 12: mod_base = um
  modified_base 13: mod_base = um
  modified_base 14: mod_base = OTHER; note = 2'-O-methyladenosine
  modified_base 15: mod_base = OTHER; note = 2'-O-methyladenosine
  modified_base 16: mod_base = OTHER; note = 2'-O-methyladenosine
  modified_base 17: mod_base = um
  modified_base 18: mod_base = um
  modified_base 19: mod_base = cm
  modified_base 20: mod_base = cm
  modified_base 21: mod_base = OTHER; note = 2'-O-methyladenosine
  source 1..21: mol_type = other RNA
caaggaagaccttaaattcca

SEQ ID NO: 843 - RNA, 21 nt, synthetic construct
  modified_base 1: mod_base = gm
  modified_base 2: mod_base = um
  modified_base 3: mod_base = cm
  modified_base 4: mod_base = cm
  modified_base 5: mod_base = OTHER; note = 2'-O-methyladenosine
  modified_base 6: mod_base = OTHER; note = 2'-O-methyladenosine
  modified_base 7: mod_base = um
  modified_base 8: mod_base = um
  modified_base 9: mod_base = OTHER; note = 2'-fluoroadenosine
  modified_base 10: mod_base = OTHER; note = 2'-fluoroadenosine
  modified_base 11: mod_base = OTHER; note = 2'-fluorocytidine
  modified_base 12: mod_base = OTHER; note = 2'-O-methyladenosine
  modified_base 13: mod_base = cm
  modified_base 14: mod_base = cm
  modified_base 15: mod_base = OTHER; note = 2'-O-methyladenosine
  modified_base 16: mod_base = OTHER; note = 2'-O-methyladenosine
  modified_base 17: mod_base = um
  modified_base 18: mod_base = OTHER; note = 2'-O-methyladenosine
  modified_base 19: mod_base = gm
  modified_base 20: mod_base = cm
  modified_base 21: mod_base = OTHER; note = 2'-O-methyladenosine
  source 1..21: mol_type = other RNA
gtccaattaacaccaatagca

SEQ ID NO: 844 - RNA, 21 nt, synthetic construct
  modified_base 1: mod_base = gm
  modified_base 2: mod_base = um
  modified_base 3: mod_base = cm
  modified_base 4: mod_base = cm
  modified_base 5: mod_base = OTHER; note = 2'-O-methyladenosine
  modified_base 6: mod_base = OTHER; note = 2'-O-methyladenosine
  modified_base 7: mod_base = gm
  modified_base 8: mod_base = OTHER; note = 2'-O-methyladenosine
  modified_base 9: mod_base = OTHER; note = 2'-fluorouridine
  modified_base 10: mod_base = OTHER; note = 2'-fluoroguanosine
  modified_base 11: mod_base = OTHER; note = 2'-fluoroguanosine
  modified_base 12: mod_base = um
  modified_base 13: mod_base = OTHER; note = 2'-O-methyladenosine
  modified_base 14: mod_base = um
  modified_base 15: mod_base = um
  modified_base 16: mod_base = um
  modified_base 17: mod_base = cm
  modified_base 18: mod_base = um
  modified_base 19: mod_base = OTHER; note = 2'-O-methyladenosine
  modified_base 20: mod_base = cm
  modified_base 21: mod_base = um
  source 1..21: mol_type = other RNA
gtccaagatggtatttctact

SEQ ID NO: 845 - RNA, 21 nt, synthetic construct
  modified_base 1: mod_base = cm
  modified_base 2: mod_base = OTHER; note = 2-aminoadenosine
  modified_base 3: mod_base = OTHER; note = 2'-O-methyladenosine
  modified_base 4: mod_base = gm
  modified_base 5: mod_base = OTHER; note = 2'-O-methyladenosine
  modified_base 6: mod_base = um
  modified_base 7: mod_base = gm
  modified_base 8: mod_base = gm
  modified_base 9: mod_base = OTHER; note = 2'-fluorouridine
  modified_base 10: mod_base = OTHER; note = 2'-fluoroadenosine
  modified_base 11: mod_base = OTHER; note = 2'-fluorouridine
  modified_base 12: mod_base = um
  modified_base 13: mod_base = um
  modified_base 14: mod_base = cm
  modified_base 15: mod_base = um
  modified_base 16: mod_base = OTHER; note = 2'-O-methyladenosine
  modified_base 17: mod_base = cm
  modified_base 18: mod_base = um
  modified_base 19: mod_base = OTHER; note = 2'-O-methyladenosine
  modified_base 20: mod_base = cm
  modified_base 21: mod_base = OTHER; note = 2'-O-methyladenosine
  source 1..21: mol_type = other RNA
caagatggtatttctactaca

SEQ ID NO: 846 - RNA, 21 nt, synthetic construct
  modified_base 1: mod_base = gm
  modified_base 2: mod_base = um
  modified_base 3: mod_base = gm
  modified_base 4: mod_base = OTHER; note = 2'-O-methyladenosine
  modified_base 5: mod_base = OTHER; note = 2'-O-methyladenosine
  modified_base 6: mod_base = um
  modified_base 7: mod_base = OTHER; note = 2'-O-methyladenosine
  modified_base 8: mod_base = cm
  modified_base 9: mod_base = OTHER; note = 2'-fluoroadenosine
  modified_base 10: mod_base = OTHER; note = 2'-fluorocytidine
  modified_base 11: mod_base = OTHER; note = 2'-fluorocytidine
  modified_base 12: mod_base = OTHER; note = 2'-O-methyladenosine
  modified_base 13: mod_base = OTHER; note = 2'-O-methyladenosine
  modified_base 14: mod_base = OTHER; note = 2'-O-methyladenosine
  modified_base 15: mod_base = OTHER; note = 2'-O-methyladenosine
  modified_base 16: mod_base = gm
  modified_base 17: mod_base = OTHER; note = 2'-O-methyladenosine
  modified_base 18: mod_base = um
  modified_base 19: mod_base = cm
  modified_base 20: mod_base = OTHER; note = 2'-O-methyladenosine
  modified_base 21: mod_base = OTHER; note = 2'-O-methyladenosine
  source 1..21: mol_type = other RNA
gtgaatacaccaaaagatcaa

SEQ ID NO: 847 - RNA, 21 nt, synthetic construct
  modified_base 1: mod_base = cm
  modified_base 2: mod_base = um
  modified_base 3: mod_base = gm
  modified_base 4: mod_base = um
  modified_base 5: mod_base = cm
  modified_base 6: mod_base = OTHER; note = 2'-O-methyladenosine
  modified_base 7: mod_base = cm
  modified_base 8: mod_base = um
  modified_base 9: mod_base = OTHER; note = 2'-fluoroadenosine
  modified_base 10: mod_base = OTHER; note = 2'-fluoroadenosine
  modified_base 11: mod_base = OTHER; note = 2'-fluoroguanosine
  modified_base 12: mod_base = OTHER; note = 2'-O-methyladenosine
  modified_base 13: mod_base = OTHER; note = 2'-O-methyladenosine
  modified_base 14: mod_base = OTHER; note = 2'-O-methyladenosine
  modified_base 15: mod_base = um
  modified_base 16: mod_base = cm
  modified_base 17: mod_base = um
  modified_base 18: mod_base = OTHER; note = 2 -O-methylinosine
  modified_base 19: mod_base = cm
  modified_base 20: mod_base = um
  modified_base 21: mod_base = OTHER; note = 2'-O-methyladenosine
  source 1..21: mol_type = other RNA
ctgtcactaagaaatctncta

SEQ ID NO: 848 - RNA, 21 nt, synthetic construct
  modified_base 1: mod_base = cm
  modified_base 2: mod_base = cm
  modified_base 3: mod_base = OTHER; note = 2'-O-methyladenosine
  modified_base 4: mod_base = cm
  modified_base 5: mod_base = um
  modified_base 6: mod_base = OTHER; note = 2'-O-methyladenosine
  modified_base 7: mod_base = OTHER; note = 2'-O-methyladenosine
  modified_base 8: mod_base = OTHER; note = 2'-O-methyladenosine
  modified_base 9: mod_base = OTHER; note = 2'-fluoroguanosine
  modified_base 10: mod_base = OTHER; note = 2'-fluorocytidine
  modified_base 11: mod_base = OTHER; note = 2'-fluoroadenosine
  modified_base 12: mod_base = um
  modified_base 13: mod_base = OTHER; note = 2'-O-methyladenosine
  modified_base 14: mod_base = cm
  modified_base 15: mod_base = OTHER; note = 2'-O-methyladenosine
  modified_base 16: mod_base = OTHER; note = 2'-O-methyladenosine
  modified_base 17: mod_base = um
  modified_base 18: mod_base = gm
  modified_base 19: mod_base = um
  modified_base 20: mod_base = OTHER; note = 2'-O-methyladenosine
  modified_base 21: mod_base = OTHER; note = 2'-O-methyladenosine
  source 1..21: mol_type = other RNA
ccactaaagcatacaatgtaa

SEQ ID NO: 849 - RNA, 21 nt, synthetic construct
  modified_base 1: mod_base = gm
  modified_base 2: mod_base = cm
  modified_base 3: mod_base = OTHER; note = 2'-O-methyladenosine
  modified_base 4: mod_base = gm
  modified_base 5: mod_base = OTHER; note = 2'-O-methyladenosine
  modified_base 6: mod_base = cm
  modified_base 7: mod_base = OTHER; note = 2'-O-methyladenosine
  modified_base 8: mod_base = OTHER; note = 2'-O-methyladenosine
  modified_base 9: mod_base = OTHER; note = 2'-fluoroguanosine
  modified_base 10: mod_base = OTHER; note = 2'-fluoroguanosine
  modified_base 11: mod_base = OTHER; note = 2'-fluoroadenosine
  modified_base 12: mod_base = OTHER; note = 2'-O-methyladenosine
  modified_base 13: mod_base = cm
  modified_base 14: mod_base = um
  modified_base 15: mod_base = gm
  modified_base 16: mod_base = OTHER; note = 2'-O-methyladenosine
  modified_base 17: mod_base = um
  modified_base 18: mod_base = um
  modified_base 19: mod_base = OTHER; note = 2'-O-methyladenosine
  modified_base 20: mod_base = cm
  modified_base 21: mod_base = OTHER; note = 2'-O-methyladenosine
  source 1..21: mol_type = other RNA
gcagacaaggaactgattaca

SEQ ID NO: 850 - RNA, 21 nt, synthetic construct
  modified_base 1: mod_base = gm
  modified_base 2: mod_base = gm
  modified_base 3: mod_base = OTHER; note = 2'-O-methyladenosine
  modified_base 4: mod_base = cm
  modified_base 5: mod_base = OTHER; note = 2'-O-methyladenosine
  modified_base 6: mod_base = OTHER; note = 2'-O-methyladenosine
  modified_base 7: mod_base = gm
  modified_base 8: mod_base = gm
  modified_base 9: mod_base = OTHER; note = 2'-fluoroadenosine
  modified_base 10: mod_base = OTHER; note = 2'-fluoroadenosine
  modified_base 11: mod_base = OTHER; note = 2'-fluorocytidine
  modified_base 12: mod_base = um
  modified_base 13: mod_base = gm
  modified_base 14: mod_base = OTHER; note = 2'-O-methyladenosine
  modified_base 15: mod_base = um
  modified_base 16: mod_base = um
  modified_base 17: mod_base = OTHER; note = 2'-O-methyladenosine
  modified_base 18: mod_base = cm
  modified_base 19: mod_base = OTHER; note = 2'-O-methyladenosine
  modified_base 20: mod_base = OTHER; note = 2'-O-methyladenosine
  modified_base 21: mod_base = OTHER; note = 2'-O-methyladenosine
  source 1..21: mol_type = other RNA
ggacaaggaactgattacaaa

SEQ ID NO: 851 - RNA, 21 nt, synthetic construct
  modified_base 1: mod_base = gm
  modified_base 2: mod_base = gm
  modified_base 3: mod_base = OTHER; note = 2'-O-methyladenosine
  modified_base 4: mod_base = OTHER; note = 2'-O-methyladenosine
  modified_base 5: mod_base = cm
  modified_base 6: mod_base = um
  modified_base 7: mod_base = gm
  modified_base 8: mod_base = OTHER; note = 2'-O-methyladenosine
  modified_base 9: mod_base = OTHER; note = 2'-fluorouridine
  modified_base 10: mod_base = OTHER; note = 2'-fluorouridine
  modified_base 11: mod_base = OTHER; note = 2'-fluoroadenosine
  modified_base 12: mod_base = cm
  modified_base 13: mod_base = OTHER; note = 2'-O-methyladenosine
  modified_base 14: mod_base = OTHER; note = 2'-O-methyladenosine
  modified_base 15: mod_base = OTHER; note = 2'-O-methyladenosine
  modified_base 16: mod_base = cm
  modified_base 17: mod_base = OTHER; note = 2'-O-methyladenosine
  modified_base 18: mod_base = um
  modified_base 19: mod_base = um
  modified_base 20: mod_base = gm
  modified_base 21: mod_base = OTHER; note = 2'-O-methyladenosine
  source 1..21: mol_type = other RNA
ggaactgattacaaacattga

SEQ ID NO: 852 - RNA, 21 nt, synthetic construct
  modified_base 1: mod_base = gm
  modified_base 2: mod_base = cm
  modified_base 3: mod_base = um
  modified_base 4: mod_base = gm
  modified_base 5: mod_base = OTHER; note = 2'-O-methyladenosine
  modified_base 6: mod_base = OTHER; note = 2'-O-methyladenosine
  modified_base 7: mod_base = um
  modified_base 8: mod_base = OTHER; note = 2'-O-methyladenosine
  modified_base 9: mod_base = OTHER; note = 2'-fluoroadenosine
  modified_base 10: mod_base = OTHER; note = 2'-fluoroguanosine
  modified_base 11: mod_base = OTHER; note = 2'-fluorocytidine
  modified_base 12: mod_base = OTHER; note = 2'-O-methyladenosine
  modified_base 13: mod_base = um
  modified_base 14: mod_base = OTHER; note = 2'-O-methyladenosine
  modified_base 15: mod_base = um
  modified_base 16: mod_base = um
  modified_base 17: mod_base = gm
  modified_base 18: mod_base = OTHER; note = 2'-O-methyladenosine
  modified_base 19: mod_base = cm
  modified_base 20: mod_base = OTHER; note = 2 -O-methylinosine
  modified_base 21: mod_base = OTHER; note = 2'-O-methyladenosine
  source 1..21: mol_type = other RNA
gctgaataagcatattgacna

SEQ ID NO: 853 - RNA, 21 nt, synthetic construct
  modified_base 1: mod_base = gm
  modified_base 1^2: mod_base = OTHER; note = phosphorothioate linkage
  modified_base 2: mod_base = cm
  modified_base 3: mod_base = um
  modified_base 4: mod_base = um
  modified_base 5: mod_base = cm
  modified_base 6: mod_base = um
  modified_base 7: mod_base = um
  modified_base 8: mod_base = OTHER; note = 2'-O-methyladenosine
  modified_base 9: mod_base = OTHER; note = 2'-fluoroadenosine
  modified_base 10: mod_base = OTHER; note = 2'-fluoroguanosine
  modified_base 11: mod_base = OTHER; note = 2'-fluoroadenosine
  modified_base 12: mod_base = gm
  modified_base 13: mod_base = um
  modified_base 14: mod_base = gm
  modified_base 15: mod_base = cm
  modified_base 16: mod_base = um
  modified_base 17: mod_base = um
  modified_base 18: mod_base = OTHER; note = 2'-O-methyladenosine
  modified_base 19: mod_base = um
  modified_base 20: mod_base = gm
  modified_base 21: mod_base = OTHER; note = 2'-O-methyladenosine
  source 1..21: mol_type = other RNA
gcttcttaagagtgcttatga

SEQ ID NO: 854 - RNA, 21 nt, synthetic construct
  modified_base 1: mod_base = cm
  modified_base 1^2: mod_base = OTHER; note = phosphorothioate linkage
  modified_base 2: mod_base = um
  modified_base 3: mod_base = um
  modified_base 4: mod_base = OTHER; note = 2'-O-methyladenosine
  modified_base 5: mod_base = gm
  modified_base 6: mod_base = OTHER; note = 2'-O-methyladenosine
  modified_base 7: mod_base = cm
  modified_base 8: mod_base = OTHER; note = 2'-O-methyladenosine
  modified_base 9: mod_base = OTHER; note = 2'-fluoroadenosine
  modified_base 10: mod_base = OTHER; note = 2'-fluorouridine
  modified_base 11: mod_base = OTHER; note = 2'-fluoroguanosine
  modified_base 12: mod_base = um
  modified_base 13: mod_base = cm
  modified_base 14: mod_base = um
  modified_base 15: mod_base = um
  modified_base 16: mod_base = OTHER; note = 2'-O-methyladenosine
  modified_base 17: mod_base = um
  modified_base 18: mod_base = cm
  modified_base 19: mod_base = um
  modified_base 20: mod_base = OTHER; note = 2'-O-methyladenosine
  modified_base 21: mod_base = OTHER; note = 2'-O-methyladenosine
  source 1..21: mol_type = other RNA
cttagacaatgtcttatctaa

SEQ ID NO: 855 - RNA, 21 nt, synthetic construct
  modified_base 1: mod_base = gm
  modified_base 1^2: mod_base = OTHER; note = phosphorothioate linkage
  modified_base 2: mod_base = cm
  modified_base 3: mod_base = OTHER; note = 2'-O-methyladenosine
  modified_base 4: mod_base = um
  modified_base 5: mod_base = um
  modified_base 6: mod_base = OTHER; note = 2'-O-methyladenosine
  modified_base 7: mod_base = OTHER; note = 2'-O-methyladenosine
  modified_base 8: mod_base = um
  modified_base 9: mod_base = OTHER; note = 2'-fluoroguanosine
  modified_base 10: mod_base = OTHER; note = 2'-fluoroguanosine
  modified_base 11: mod_base = OTHER; note = 2'-fluorocytidine
  modified_base 12: mod_base = OTHER; note = 2'-O-methyladenosine
  modified_base 13: mod_base = OTHER; note = 2'-O-methyladenosine
  modified_base 14: mod_base = um
  modified_base 15: mod_base = cm
  modified_base 16: mod_base = um
  modified_base 17: mod_base = um
  modified_base 18: mod_base = cm
  modified_base 19: mod_base = OTHER; note = 2'-O-methyladenosine
  modified_base 20: mod_base = um
  modified_base 21: mod_base = OTHER; note = 2'-O-methyladenosine
  source 1..21: mol_type = other RNA
gcattaatggcaatcttcata

SEQ ID NO: 856 - RNA, 21 nt, synthetic construct
  modified_base 1: mod_base = gm
  modified_base 1^2: mod_base = OTHER; note = phosphorothioate linkage
  modified_base 2: mod_base = OTHER; note = 2'-O-methyladenosine
  modified_base 3: mod_base = um
  modified_base 4: mod_base = gm
  modified_base 5: mod_base = cm
  modified_base 6: mod_base = um
  modified_base 7: mod_base = um
  modified_base 8: mod_base = OTHER; note = 2'-O-methyladenosine
  modified_base 9: mod_base = OTHER; note = 2'-fluorocytidine
  modified_base 10: mod_base = OTHER; note = 2'-fluoroguanosine
  modified_base 11: mod_base = OTHER; note = 2'-fluorouridine
  modified_base 12: mod_base = um
  modified_base 13: mod_base = OTHER; note = 2'-O-methyladenosine
  modified_base 14: mod_base = OTHER; note = 2'-O-methyladenosine
  modified_base 15: mod_base = um
  modified_base 16: mod_base = OTHER; note = 2'-O-methyladenosine
  modified_base 17: mod_base = cm
  modified_base 18: mod_base = gm
  modified_base 19: mod_base = um
  modified_base 20: mod_base = um
  modified_base 21: mod_base = um
  source 1..21: mol_type = other RNA
gatgcttacgttaatacgttt

SEQ ID NO: 857 - RNA, 21 nt, synthetic construct
  modified_base 1: mod_base = gm
  modified_base 1^2: mod_base = OTHER; note = phosphorothioate linkage
  modified_base 2: mod_base = cm
  modified_base 3: mod_base = OTHER; note = 2'-O-methyladenosine
  modified_base 4: mod_base = cm
  modified_base 5: mod_base = cm
  modified_base 6: mod_base = um
  modified_base 7: mod_base = um
  modified_base 8: mod_base = um
  modified_base 9: mod_base = OTHER; note = 2'-fluoroguanosine
  modified_base 10: mod_base = OTHER; note = 2'-fluoroadenosine
  modified_base 11: mod_base = OTHER; note = 2'-fluorocytidine
  modified_base 12: mod_base = OTHER; note = 2'-O-methyladenosine
  modified_base 13: mod_base = OTHER; note = 2'-O-methyladenosine
  modified_base 14: mod_base = um
  modified_base 15: mod_base = cm
  modified_base 16: mod_base = um
  modified_base 17: mod_base = um
  modified_base 18: mod_base = OTHER; note = 2'-O-methyladenosine
  modified_base 19: mod_base = OTHER; note = 2'-O-methyladenosine
  modified_base 20: mod_base = gm
  modified_base 21: mod_base = OTHER; note = 2'-O-methyladenosine
  source 1..21: mol_type = other RNA
gcacctttgacaatcttaaga

SEQ ID NO: 858 - RNA, 21 nt, synthetic construct
  modified_base 1: mod_base = gm
  modified_base 1^2: mod_base = OTHER; note = phosphorothioate linkage
  modified_base 2: mod_base = gm
  modified_base 3: mod_base = OTHER; note = 2'-O-methyladenosine
  modified_base 4: mod_base = OTHER; note = 2'-O-methyladenosine
  modified_base 5: mod_base = gm
  modified_base 6: mod_base = um
  modified_base 7: mod_base = OTHER; note = 2'-O-methyladenosine
  modified_base 8: mod_base = gm
  modified_base 9: mod_base = OTHER; note = 2'-fluorouridine
  modified_base 10: mod_base = OTHER; note = 2'-fluoroguanosine
  modified_base 11: mod_base = OTHER; note = 2'-fluoroguanosine
  modified_base 12: mod_base = OTHER; note = 2'-O-methyladenosine
  modified_base 13: mod_base = OTHER; note = 2'-O-methyladenosine
  modified_base 14: mod_base = OTHER; note = 2'-O-methyladenosine
  modified_base 15: mod_base = OTHER; note = 2'-O-methyladenosine
  modified_base 16: mod_base = um
  modified_base 17: mod_base = cm
  modified_base 18: mod_base = cm
  modified_base 19: mod_base = um
  modified_base 20: mod_base = OTHER; note = 2'-O-methyladenosine
  modified_base 21: mod_base = OTHER; note = 2'-O-methyladenosine
  source 1..21: mol_type = other RNA
ggaagtagtggaaaatcctaa

SEQ ID NO: 859 - RNA, 21 nt, synthetic construct
  modified_base 1: mod_base = cm
  modified_base 1^2: mod_base = OTHER; note = phosphorothioate linkage
  modified_base 2: mod_base = cm
  modified_base 3: mod_base = um
  modified_base 4: mod_base = um
  modified_base 5: mod_base = um
  modified_base 6: mod_base = um
  modified_base 7: mod_base = gm
  modified_base 8: mod_base = OTHER; note = 2'-O-methyladenosine
  modified_base 9: mod_base = OTHER; note = 2'-fluorouridine
  modified_base 10: mod_base = OTHER; note = 2'-fluoroguanosine
  modified_base 11: mod_base = OTHER; note = 2'-fluorouridine
  modified_base 12: mod_base = um
  modified_base 13: mod_base = gm
  modified_base 14: mod_base = um
  modified_base 15: mod_base = um
  modified_base 16: mod_base = OTHER; note = 2'-O-methyladenosine
  modified_base 17: mod_base = gm
  modified_base 18: mod_base = OTHER; note = 2'-O-methyladenosine
  modified_base 19: mod_base = cm
  modified_base 20: mod_base = OTHER; note = 2'-O-methyladenosine
  modified_base 21: mod_base = OTHER; note = 2'-O-methyladenosine
  source 1..21: mol_type = other RNA
ccttttgatgttgttagacaa

SEQ ID NO: 860 - RNA, 21 nt, synthetic construct
  modified_base 1: mod_base = um
  modified_base 1^2: mod_base = OTHER; note = phosphorothioate linkage
  modified_base 2: mod_base = gm
  modified_base 3: mod_base = gm
  modified_base 4: mod_base = um
  modified_base 5: mod_base = OTHER; note = 2'-O-methyladenosine
  modified_base 6: mod_base = OTHER; note = 2'-O-methyladenosine
  modified_base 7: mod_base = um
  modified_base 8: mod_base = gm
  modified_base 9: mod_base = OTHER; note = 2'-fluorocytidine
  modified_base 10: mod_base = OTHER; note = 2'-fluorouridine
  modified_base 11: mod_base = OTHER; note = 2'-fluorouridine
  modified_base 12: mod_base = um
  modified_base 13: mod_base = OTHER; note = 2'-O-methyladenosine
  modified_base 14: mod_base = gm
  modified_base 15: mod_base = OTHER; note = 2'-O-methyladenosine
  modified_base 16: mod_base = um
  modified_base 17: mod_base = cm
  modified_base 18: mod_base = OTHER; note = 2'-O-methyladenosine
  modified_base 19: mod_base = OTHER; note = 2'-O-methyladenosine
  modified_base 20: mod_base = gm
  modified_base 21: mod_base = OTHER; note = 2'-O-methyladenosine
  source 1..21: mol_type = other RNA
tggtaatgctttagatcaaga

SEQ ID NO: 861 - RNA, 21 nt, synthetic construct
  modified_base 1: mod_base = cm
  modified_base 1^2: mod_base = OTHER; note = phosphorothioate linkage
  modified_base 2: mod_base = OTHER; note = 2'-O-methyladenosine
  modified_base 3: mod_base = OTHER; note = 2'-O-methyladenosine
  modified_base 4: mod_base = gm
  modified_base 5: mod_base = cm
  modified_base 6: mod_base = um
  modified_base 7: mod_base = OTHER; note = 2'-O-methyladenosine
  modified_base 8: mod_base = um
  modified_base 9: mod_base = OTHER; note = 2'-fluoroguanosine
  modified_base 10: mod_base = OTHER; note = 2'-fluoroadenosine
  modified_base 11: mod_base = OTHER; note = 2'-fluorocytidine
  modified_base 12: mod_base = cm
  modified_base 13: mod_base = cm
  modified_base 14: mod_base = OTHER; note = 2'-O-methyladenosine
  modified_base 15: mod_base = OTHER; note = 2'-O-methyladenosine
  modified_base 16: mod_base = OTHER; note = 2'-O-methyladenosine
  modified_base 17: mod_base = um
  modified_base 18: mod_base = gm
  modified_base 19: mod_base = um
  modified_base 20: mod_base = OTHER; note = 2'-O-methyladenosine
  modified_base 21: mod_base = um
  source 1..21: mol_type = other RNA
caagctatgacccaaatgtat

SEQ ID NO: 862 - RNA, 21 nt, synthetic construct
  modified_base 1: mod_base = gm
  modified_base 1^2: mod_base = OTHER; note = phosphorothioate linkage
  modified_base 2: mod_base = um
  modified_base 3: mod_base = cm
  modified_base 4: mod_base = cm
  modified_base 5: mod_base = OTHER; note = 2'-O-methyladenosine
  modified_base 6: mod_base = OTHER; note = 2'-O-methyladenosine
  modified_base 7: mod_base = gm
  modified_base 8: mod_base = OTHER; note = 2'-O-methyladenosine
  modified_base 9: mod_base = OTHER; note = 2'-fluorouridine
  modified_base 10: mod_base = OTHER; note = 2'-fluoroguanosine
  modified_base 11: mod_base = OTHER; note = 2'-fluoroguanosine
  modified_base 12: mod_base = um
  modified_base 13: mod_base = OTHER; note = 2'-O-methyladenosine
  modified_base 14: mod_base = um
  modified_base 15: mod_base = um
  modified_base 16: mod_base = um
  modified_base 17: mod_base = cm
  modified_base 18: mod_base = um
  modified_base 19: mod_base = OTHER; note = 2'-O-methyladenosine
  modified_base 20: mod_base = cm
  modified_base 21: mod_base = um
  source 1..21: mol_type = other RNA
gtccaagatggtatttctact

SEQ ID NO: 863 - RNA, 21 nt, synthetic construct
  modified_base 1: mod_base = cm
  modified_base 1^2: mod_base = OTHER; note = phosphorothioate linkage
  modified_base 2: mod_base = OTHER; note = 2'-O-methyladenosine
  modified_base 3: mod_base = OTHER; note = 2'-O-methyladenosine
  modified_base 4: mod_base = gm
  modified_base 5: mod_base = OTHER; note = 2'-O-methyladenosine
  modified_base 6: mod_base = um
  modified_base 7: mod_base = gm
  modified_base 8: mod_base = gm
  modified_base 9: mod_base = OTHER; note = 2'-fluorouridine
  modified_base 10: mod_base = OTHER; note = 2'-fluoroadenosine
  modified_base 11: mod_base = OTHER; note = 2'-fluorouridine
  modified_base 12: mod_base = um
  modified_base 13: mod_base = um
  modified_base 14: mod_base = cm
  modified_base 15: mod_base = um
  modified_base 16: mod_base = OTHER; note = 2'-O-methyladenosine
  modified_base 17: mod_base = cm
  modified_base 18: mod_base = um
  modified_base 19: mod_base = OTHER; note = 2'-O-methyladenosine
  modified_base 20: mod_base = cm
  modified_base 21: mod_base = OTHER; note = 2'-O-methyladenosine
  source 1..21: mol_type = other RNA
caagatggtatttctactaca

SEQ ID NO: 864 - RNA, 21 nt, synthetic construct
  modified_base 1: mod_base = cm
  modified_base 1^2: mod_base = OTHER; note = phosphorothioate linkage
  modified_base 2: mod_base = cm
  modified_base 3: mod_base = OTHER; note = 2'-O-methyladenosine
  modified_base 4: mod_base = cm
  modified_base 5: mod_base = um
  modified_base 6: mod_base = OTHER; note = 2'-O-methyladenosine
  modified_base 7: mod_base = OTHER; note = 2'-O-methyladenosine
  modified_base 8: mod_base = OTHER; note = 2'-O-methyladenosine
  modified_base 9: mod_base = OTHER; note = 2'-fluoroguanosine
  modified_base 10: mod_base = OTHER; note = 2'-fluorocytidine
  modified_base 11: mod_base = OTHER; note = 2'-fluoroadenosine
  modified_base 12: mod_base = um
  modified_base 13: mod_base = OTHER; note = 2'-O-methyladenosine
  modified_base 14: mod_base = cm
  modified_base 15: mod_base = OTHER; note = 2'-O-methyladenosine
  modified_base 16: mod_base = OTHER; note = 2'-O-methyladenosine
  modified_base 17: mod_base = um
  modified_base 18: mod_base = gm
  modified_base 19: mod_base = um
  modified_base 20: mod_base = OTHER; note = 2'-O-methyladenosine
  modified_base 21: mod_base = OTHER; note = 2'-O-methyladenosine
  source 1..21: mol_type = other RNA
ccactaaagcatacaatgtaa

SEQ ID NO: 865 - RNA, 21 nt, synthetic construct
  modified_base 1: mod_base = gm
  modified_base 1^2: mod_base = OTHER; note = phosphorothioate linkage
  modified_base 2: mod_base = gm
  modified_base 3: mod_base = OTHER; note = 2'-O-methyladenosine
  modified_base 4: mod_base = cm
  modified_base 5: mod_base = OTHER; note = 2'-O-methyladenosine
  modified_base 6: mod_base = OTHER; note = 2'-O-methyladenosine
  modified_base 7: mod_base = gm
  modified_base 8: mod_base = gm
  modified_base 9: mod_base = OTHER; note = 2'-fluoroadenosine
  modified_base 10: mod_base = OTHER; note = 2'-fluoroadenosine
  modified_base 11: mod_base = OTHER; note = 2'-fluorocytidine
  modified_base 12: mod_base = um
  modified_base 13: mod_base = gm
  modified_base 14: mod_base = OTHER; note = 2'-O-methyladenosine
  modified_base 15: mod_base = um
  modified_base 16: mod_base = um
  modified_base 17: mod_base = OTHER; note = 2'-O-methyladenosine
  modified_base 18: mod_base = cm
  modified_base 19: mod_base = OTHER; note = 2'-O-methyladenosine
  modified_base 20: mod_base = OTHER; note = 2'-O-methyladenosine
  modified_base 21: mod_base = OTHER; note = 2'-O-methyladenosine
  source 1..21: mol_type = other RNA
ggacaaggaactgattacaaa

SEQ ID NO: 866 - RNA, 21 nt, synthetic construct
  modified_base 1: mod_base = gm
  modified_base 1^2: mod_base = OTHER; note = phosphorothioate linkage
  modified_base 2: mod_base = cm
  modified_base 3: mod_base = OTHER; note = 2'-O-methyladenosine
  modified_base 4: mod_base = um
  modified_base 5: mod_base = gm
  modified_base 6: mod_base = gm
  modified_base 7: mod_base = um
  modified_base 8: mod_base = OTHER; note = 2'-O-methyladenosine
  modified_base 9: mod_base = OTHER; note = 2'-fluorocytidine
  modified_base 10: mod_base = OTHER; note = 2'-fluorocytidine
  modified_base 11: mod_base = OTHER; note = 2'-fluoroadenosine
  modified_base 12: mod_base = cm
  modified_base 13: mod_base = OTHER; note = 2'-O-methyladenosine
  modified_base 14: mod_base = um
  modified_base 15: mod_base = OTHER; note = 2'-O-methyladenosine
  modified_base 16: mod_base = um
  modified_base 17: mod_base = OTHER; note = 2'-O-methyladenosine
  modified_base 18: mod_base = um
  modified_base 19: mod_base = cm
  modified_base 20: mod_base = OTHER; note = 2'-O-methyladenosine
  modified_base 21: mod_base = OTHER; note = 2'-O-methyladenosine
  source 1..21: mol_type = other RNA
gcatggtaccacatatatcaa

SEQ ID NO: 867 - RNA, 21 nt, synthetic construct
  modified_base 1: mod_base = gm
  modified_base 1^2: mod_base = OTHER; note = phosphorothioate linkage
  modified_base 2: mod_base = um
  modified_base 3: mod_base = OTHER; note = 2'-O-methyladenosine
  modified_base 4: mod_base = cm
  modified_base 5: mod_base = um
  modified_base 6: mod_base = gm
  modified_base 7: mod_base = OTHER; note = 2'-O-methyladenosine
  modified_base 8: mod_base = cm
  modified_base 9: mod_base = OTHER; note = 2'-fluoroadenosine
  modified_base 10: mod_base = OTHER; note = 2'-fluorouridine
  modified_base 11: mod_base = OTHER; note = 2'-fluorouridine
  modified_base 12: mod_base = OTHER; note = 2'-O-methyladenosine
  modified_base 13: mod_base = gm
  modified_base 14: mod_base = OTHER; note = 2'-O-methyladenosine
  modified_base 15: mod_base = um
  modified_base 16: mod_base = OTHER; note = 2'-O-methyladenosine
  modified_base 17: mod_base = OTHER; note = 2'-O-methyladenosine
  modified_base 18: mod_base = um
  modified_base 19: mod_base = cm
  modified_base 20: mod_base = OTHER; note = 2'-O-methyladenosine
  modified_base 21: mod_base = OTHER; note = 2'-O-methyladenosine
  source 1..21: mol_type = other RNA
gtactgacattagataatcaa

SEQ ID NO: 868 - RNA, 21 nt, synthetic construct
  modified_base 1: mod_base = gm
  modified_base 1^2: mod_base = OTHER; note = phosphorothioate linkage
  modified_base 2: mod_base = gm
  modified_base 3: mod_base = OTHER; note = 2'-O-methyladenosine
  modified_base 4: mod_base = um
  modified_base 5: mod_base = gm
  modified_base 6: mod_base = um
  modified_base 7: mod_base = OTHER; note = 2'-O-methyladenosine
  modified_base 8: mod_base = OTHER; note = 2'-O-methyladenosine
  modified_base 9: mod_base = OTHER; note = 2'-fluoroadenosine
  modified_base 10: mod_base = OTHER; note = 2'-fluorocytidine
  modified_base 11: mod_base = OTHER; note = 2'-fluorouridine
  modified_base 12: mod_base = um
  modified_base 13: mod_base = OTHER; note = 2'-O-methyladenosine
  modified_base 14: mod_base = cm
  modified_base 15: mod_base = OTHER; note = 2'-O-methyladenosine
  modified_base 16: mod_base = um
  modified_base 17: mod_base = OTHER; note = 2'-O-methyladenosine
  modified_base 18: mod_base = gm
  modified_base 19: mod_base = cm
  modified_base 20: mod_base = um
  modified_base 21: mod_base = OTHER; note = 2'-O-methyladenosine
  source 1..21: mol_type = other RNA
ggatgtaaacttacatagcta

SEQ ID NO: 869 - RNA, 21 nt, synthetic construct
  modified_base 1: mod_base = cm
  modified_base 1^2: mod_base = OTHER; note = phosphorothioate linkage
  modified_base 2: mod_base = OTHER; note = 2'-O-methyladenosine
  modified_base 3: mod_base = um
  modified_base 4: mod_base = OTHER; note = 2'-O-methyladenosine
  modified_base 5: mod_base = cm
  modified_base 6: mod_base = OTHER; note = 2'-O-methyladenosine
  modified_base 7: mod_base = OTHER; note = 2'-O-methyladenosine
  modified_base 8: mod_base = um
  modified_base 9: mod_base = OTHER; note = 2'-fluoroguanosine
  modified_base 10: mod_base = OTHER; note = 2'-fluorocytidine
  modified_base 11: mod_base = OTHER; note = 2'-fluorouridine
  modified_base 12: mod_base = OTHER; note = 2'-O-methyladenosine
  modified_base 13: mod_base = gm
  modified_base 14: mod_base = um
  modified_base 15: mod_base = um
  modified_base 16: mod_base = OTHER; note = 2'-O-methyladenosine
  modified_base 17: mod_base = OTHER; note = 2'-O-methyladenosine
  modified_base 18: mod_base = OTHER; note = 2'-O-methyladenosine
  modified_base 19: mod_base = cm
  modified_base 20: mod_base = OTHER; note = 2'-O-methyladenosine
  modified_base 21: mod_base = OTHER; note = 2'-O-methyladenosine
  source 1..21: mol_type = other RNA
catacaatgctagttaaacaa

SEQ ID NO: 870 - RNA, 21 nt, synthetic construct
  modified_base 1: mod_base = um
  modified_base 1^2: mod_base = OTHER; note = phosphorothioate linkage
  modified_base 2: mod_base = gm
  modified_base 3: mod_base = cm
  modified_base 4: mod_base = um
  modified_base 5: mod_base = gm
  modified_base 6: mod_base = um
  modified_base 7: mod_base = gm
  modified_base 8: mod_base = gm
  modified_base 9: mod_base = OTHER; note = 2'-fluorouridine
  modified_base 10: mod_base = um
  modified_base 11: mod_base = OTHER; note = 2'-fluoroadenosine
  modified_base 12: mod_base = um
  modified_base 13: mod_base = OTHER; note = 2'-fluoroadenosine
  modified_base 14: mod_base = cm
  modified_base 15: mod_base = cm
  modified_base 16: mod_base = um
  modified_base 17: mod_base = OTHER; note = 2'-O-methyladenosine
  modified_base 18: mod_base = cm
  modified_base 19: mod_base = um
  modified_base 20: mod_base = OTHER; note = 2'-O-methyladenosine
  modified_base 21: mod_base = OTHER; note = 2'-O-methyladenosine
  source 1..21: mol_type = other RNA
tgctgtggttatacctactaa

SEQ ID NO: 871 - RNA, 21 nt, synthetic construct
  modified_base 1: mod_base = gm
  modified_base 1^2: mod_base = OTHER; note = phosphorothioate linkage
  modified_base 2: mod_base = cm
  modified_base 3: mod_base = OTHER; note = 2'-O-methyladenosine
  modified_base 4: mod_base = OTHER; note = 2'-O-methyladenosine
  modified_base 5: mod_base = um
  modified_base 6: mod_base = cm
  modified_base 7: mod_base = OTHER; note = 2'-fluorouridine
  modified_base 8: mod_base = um
  modified_base 9: mod_base = OTHER; note = 2'-fluoroadenosine
  modified_base 10: mod_base = OTHER; note = 2'-O-methyladenosine
  modified_base 11: mod_base = OTHER; note = 2'-fluoroguanosine
  modified_base 12: mod_base = OTHER; note = 2'-O-methyladenosine
  modified_base 13: mod_base = cm
  modified_base 14: mod_base = OTHER; note = 2'-O-methyladenosine
  modified_base 15: mod_base = cm
  modified_base 16: mod_base = um
  modified_base 17: mod_base = um
  modified_base 18: mod_base = cm
  modified_base 19: mod_base = um
  modified_base 20: mod_base = um
  modified_base 21: mod_base = um
  source 1..21: mol_type = other RNA
gcaatcttaagacacttcttt

SEQ ID NO: 872 - RNA, 21 nt, synthetic construct
  modified_base 1: mod_base = gm
  modified_base 1^2: mod_base = OTHER; note = phosphorothioate linkage
  modified_base 2: mod_base = cm
  modified_base 3: mod_base = um
  modified_base 4: mod_base = gm
  modified_base 5: mod_base = OTHER; note = 2'-O-methyladenosine
  modified_base 6: mod_base = OTHER; note = 2'-O-methyladenosine
  modified_base 7: mod_base = OTHER; note = 2'-fluorouridine
  modified_base 8: mod_base = OTHER; note = 2'-O-methyladenosine
  modified_base 9: mod_base = OTHER; note = 2'-fluoroadenosine
  modified_base 10: mod_base = gm
  modified_base 11: mod_base = OTHER; note = 2'-fluorocytidine
  modified_base 12: mod_base = OTHER; note = 2'-O-methyladenosine
  modified_base 13: mod_base = um
  modified_base 14: mod_base = OTHER; note = 2'-O-methyladenosine
  modified_base 15: mod_base = um
  modified_base 16: mod_base = um
  modified_base 17: mod_base = gm
  modified_base 18: mod_base = OTHER; note = 2'-O-methyladenosine
  modified_base 19: mod_base = cm
  modified_base 20: mod_base = OTHER; note = 2 -O-methylinosine
  modified_base 21: mod_base = OTHER; note = 2'-O-methyladenosine
  source 1..21: mol_type = other RNA
gctgaataagcatattgacna

SEQ ID NO: 873 - RNA, 21 nt, synthetic construct
  modified_base 1: mod_base = gm
  modified_base 2: mod_base = cm
  modified_base 3: mod_base = um
  modified_base 4: mod_base = um
  modified_base 5: mod_base = cm
  modified_base 6: mod_base = um
  modified_base 7: mod_base = um
  modified_base 8: mod_base = OTHER; note = 2'-O-methyladenosine
  modified_base 9: mod_base = OTHER; note = 2'-fluoroadenosine
  modified_base 10: mod_base = OTHER; note = 2'-fluoroguanosine
  modified_base 11: mod_base = OTHER; note = 2'-fluoroadenosine
  modified_base 12: mod_base = gm
  modified_base 13: mod_base = um
  modified_base 14: mod_base = gm
  modified_base 15: mod_base = cm
  modified_base 16: mod_base = um
  modified_base 17: mod_base = um
  modified_base 18: mod_base = OTHER; note = 2'-O-methyladenosine
  modified_base 19: mod_base = um
  modified_base 20: mod_base = gm
  modified_base 21: mod_base = OTHER; note = 2'-O-methyladenosine
  source 1..21: mol_type = other RNA
gcttcttaagagtgcttatga

SEQ ID NO: 874 - RNA, 21 nt, synthetic construct
  modified_base 1: mod_base = cm
  modified_base 2: mod_base = um
  modified_base 3: mod_base = um
  modified_base 4: mod_base = cm
  modified_base 5: mod_base = um
  modified_base 6: mod_base = um
  modified_base 7: mod_base = OTHER; note = 2'-O-methyladenosine
  modified_base 8: mod_base = OTHER; note = 2'-O-methyladenosine
  modified_base 9: mod_base = OTHER; note = 2'-fluoroguanosine
  modified_base 10: mod_base = OTHER; note = 2'-fluoroadenosine
  modified_base 11: mod_base = OTHER; note = 2'-fluoroguanosine
  modified_base 12: mod_base = um
  modified_base 13: mod_base = gm
  modified_base 14: mod_base = cm
  modified_base 15: mod_base = um
  modified_base 16: mod_base = um
  modified_base 17: mod_base = OTHER; note = 2'-O-methyladenosine
  modified_base 18: mod_base = um
  modified_base 19: mod_base = gm
  modified_base 20: mod_base = OTHER; note = 2'-O-methyladenosine
  modified_base 21: mod_base = OTHER; note = 2'-O-methyladenosine
  source 1..21: mol_type = other RNA
cttcttaagagtgcttatgaa

SEQ ID NO: 875 - RNA, 21 nt, synthetic construct
  modified_base 1: mod_base = cm
  modified_base 2: mod_base = um
  modified_base 3: mod_base = um
  modified_base 4: mod_base = OTHER; note = 2'-O-methyladenosine
  modified_base 5: mod_base = gm
  modified_base 6: mod_base = OTHER; note = 2'-O-methyladenosine
  modified_base 7: mod_base = cm
  modified_base 8: mod_base = OTHER; note = 2'-O-methyladenosine
  modified_base 9: mod_base = OTHER; note = 2'-fluoroadenosine
  modified_base 10: mod_base = OTHER; note = 2'-fluorouridine
  modified_base 11: mod_base = OTHER; note = 2'-fluoroguanosine
  modified_base 12: mod_base = um
  modified_base 13: mod_base = cm
  modified_base 14: mod_base = um
  modified_base 15: mod_base = um
  modified_base 16: mod_base = OTHER; note = 2'-O-methyladenosine
  modified_base 17: mod_base = um
  modified_base 18: mod_base = cm
  modified_base 19: mod_base = um
  modified_base 20: mod_base = OTHER; note = 2'-O-methyladenosine
  modified_base 21: mod_base = OTHER; note = 2'-O-methyladenosine
  source 1..21: mol_type = other RNA
cttagacaatgtcttatctaa

SEQ ID NO: 876 - RNA, 21 nt, synthetic construct
  modified_base 1: mod_base = gm
  modified_base 2: mod_base = cm
  modified_base 3: mod_base = OTHER; note = 2'-O-methyladenosine
  modified_base 4: mod_base = cm
  modified_base 5: mod_base = cm
  modified_base 6: mod_base = um
  modified_base 7: mod_base = um
  modified_base 8: mod_base = um
  modified_base 9: mod_base = OTHER; note = 2'-fluoroguanosine
  modified_base 10: mod_base = OTHER; note = 2'-fluoroadenosine
  modified_base 11: mod_base = OTHER; note = 2'-fluorocytidine
  modified_base 12: mod_base = OTHER; note = 2'-O-methyladenosine
  modified_base 13: mod_base = OTHER; note = 2'-O-methyladenosine
  modified_base 14: mod_base = um
  modified_base 15: mod_base = cm
  modified_base 16: mod_base = um
  modified_base 17: mod_base = um
  modified_base 18: mod_base = OTHER; note = 2'-O-methyladenosine
  modified_base 19: mod_base = OTHER; note = 2'-O-methyladenosine
  modified_base 20: mod_base = gm
  modified_base 21: mod_base = OTHER; note = 2'-O-methyladenosine
  source 1..21: mol_type = other RNA
gcacctttgacaatcttaaga

SEQ ID NO: 877 - RNA, 21 nt, synthetic construct
  modified_base 1: mod_base = gm
  modified_base 2: mod_base = gm
  modified_base 3: mod_base = OTHER; note = 2'-O-methyladenosine
  modified_base 4: mod_base = OTHER; note = 2'-O-methyladenosine
  modified_base 5: mod_base = gm
  modified_base 6: mod_base = um
  modified_base 7: mod_base = OTHER; note = 2'-O-methyladenosine
  modified_base 8: mod_base = gm
  modified_base 9: mod_base = OTHER; note = 2'-fluorouridine
  modified_base 10: mod_base = OTHER; note = 2'-fluoroguanosine
  modified_base 11: mod_base = OTHER; note = 2'-fluoroguanosine
  modified_base 12: mod_base = OTHER; note = 2'-O-methyladenosine
  modified_base 13: mod_base = OTHER; note = 2'-O-methyladenosine
  modified_base 14: mod_base = OTHER; note = 2'-O-methyladenosine
  modified_base 15: mod_base = OTHER; note = 2'-O-methyladenosine
  modified_base 16: mod_base = um
  modified_base 17: mod_base = cm
  modified_base 18: mod_base = cm
  modified_base 19: mod_base = um
  modified_base 20: mod_base = OTHER; note = 2'-O-methyladenosine
  modified_base 21: mod_base = OTHER; note = 2'-O-methyladenosine
  source 1..21: mol_type = other RNA
ggaagtagtggaaaatcctaa

SEQ ID NO: 878 - RNA, 21 nt, synthetic construct
  modified_base 1: mod_base = gm
  modified_base 1^2: mod_base = OTHER; note = phosphorothioate linkage
  modified_base 2: mod_base = gm
  modified_base 2^3: mod_base = OTHER; note = phosphorothioate linkage
  modified_base 3: mod_base = OTHER; note = 2'-O-methyladenosine
  modified_base 4: mod_base = OTHER; note = 2'-O-methyladenosine
  modified_base 5: mod_base = gm
  modified_base 6: mod_base = um
  modified_base 7: mod_base = OTHER; note = 2'-O-methyladenosine
  modified_base 8: mod_base = gm
  modified_base 9: mod_base = OTHER; note = 2'-fluorouridine
  modified_base 10: mod_base = OTHER; note = 2'-fluoroguanosine
  modified_base 11: mod_base = OTHER; note = 2'-fluoroguanosine
  modified_base 12: mod_base = OTHER; note = 2'-O-methyladenosine
  modified_base 13: mod_base = OTHER; note = 2'-O-methyladenosine
  modified_base 14: mod_base = OTHER; note = 2'-O-methyladenosine
  modified_base 15: mod_base = OTHER; note = 2'-O-methyladenosine
  modified_base 16: mod_base = um
  modified_base 17: mod_base = cm
  modified_base 18: mod_base = cm
  modified_base 19: mod_base = um
  modified_base 20: mod_base = OTHER; note = 2'-O-methyladenosine
  modified_base 20^21: mod_base = OTHER; note = phosphorothioate linkage
  modified_base 21: mod_base = OTHER; note = 2'-O-methyladenosine
  source 1..21: mol_type = other RNA
ggaagtagtggaaaatcctaa

SEQ ID NO: 879 - RNA, 21 nt, synthetic construct
  modified_base 1: mod_base = gm
  modified_base 1^2: mod_base = OTHER; note = phosphorothioate linkage
  modified_base 2: mod_base = um
  modified_base 3: mod_base = cm
  modified_base 4: mod_base = cm
  modified_base 5: mod_base = OTHER; note = 2'-O-methyladenosine
  modified_base 6: mod_base = OTHER; note = 2'-O-methyladenosine
  modified_base 7: mod_base = gm
  modified_base 8: mod_base = OTHER; note = 2'-O-methyladenosine
  modified_base 9: mod_base = OTHER; note = 2'-fluorouridine
  modified_base 10: mod_base = OTHER; note = 2'-fluoroguanosine
  modified_base 11: mod_base = OTHER; note = 2'-fluoroguanosine
  modified_base 12: mod_base = um
  modified_base 13: mod_base = OTHER; note = 2'-O-methyladenosine
  modified_base 14: mod_base = um
  modified_base 15: mod_base = um
  modified_base 16: mod_base = um
  modified_base 17: mod_base = cm
  modified_base 18: mod_base = um
  modified_base 19: mod_base = OTHER; note = 2'-O-methyladenosine
  modified_base 20: mod_base = cm
  modified_base 21: mod_base = OTHER; note = 2'-O-methyladenosine
  source 1..21: mol_type = other RNA
gtccaagatggtatttctaca

SEQ ID NO: 880 - RNA, 21 nt, synthetic construct
  modified_base 1: mod_base = cm
  modified_base 2: mod_base = OTHER; note = 2'-O-methyladenosine
  modified_base 3: mod_base = um
  modified_base 4: mod_base = OTHER; note = 2'-O-methyladenosine
  modified_base 5: mod_base = cm
  modified_base 6: mod_base = OTHER; note = 2'-O-methyladenosine
  modified_base 7: mod_base = OTHER; note = 2'-O-methyladenosine
  modified_base 8: mod_base = um
  modified_base 9: mod_base = OTHER; note = 2'-fluoroguanosine
  modified_base 10: mod_base = OTHER; note = 2'-fluorocytidine
  modified_base 11: mod_base = OTHER; note = 2'-fluorouridine
  modified_base 12: mod_base = OTHER; note = 2'-O-methyladenosine
  modified_base 13: mod_base = gm
  modified_base 14: mod_base = um
  modified_base 15: mod_base = um
  modified_base 16: mod_base = OTHER; note = 2'-O-methyladenosine
  modified_base 17: mod_base = OTHER; note = 2'-O-methyladenosine
  modified_base 18: mod_base = OTHER; note = 2'-O-methyladenosine
  modified_base 19: mod_base = cm
  modified_base 20: mod_base = OTHER; note = 2'-O-methyladenosine
  modified_base 21: mod_base = OTHER; note = 2'-O-methyladenosine
  source 1..21: mol_type = other RNA
catacaatgctagttaaacaa

SEQ ID NO: 881 - RNA, 21 nt, synthetic construct
  modified_base 1: mod_base = cm
  modified_base 2: mod_base = OTHER; note = 2'-O-methyladenosine
  modified_base 3: mod_base = OTHER; note = 2'-O-methyladenosine
  modified_base 4: mod_base = gm
  modified_base 5: mod_base = OTHER; note = 2'-O-methyladenosine
  modified_base 6: mod_base = um
  modified_base 7: mod_base = gm
  modified_base 8: mod_base = gm
  modified_base 9: mod_base = OTHER; note = 2'-fluorouridine
  modified_base 10: mod_base = OTHER; note = 2'-fluoroadenosine
  modified_base 11: mod_base = OTHER; note = 2'-fluorouridine
  modified_base 12: mod_base = um
  modified_base 13: mod_base = um
  modified_base 14: mod_base = cm
  modified_base 15: mod_base = um
  modified_base 16: mod_base = OTHER; note = 2'-O-methyladenosine
  modified_base 17: mod_base = cm
  modified_base 18: mod_base = um
  modified_base 19: mod_base = OTHER; note = 2'-O-methyladenosine
  modified_base 20: mod_base = cm
  modified_base 21: mod_base = OTHER; note = 2'-O-methyladenosine
  source 1..21: mol_type = other RNA
caagatggtatttctactaca

SEQ ID NO: 882 - RNA, 21 nt, synthetic construct
  modified_base 1: mod_base = gm
  modified_base 2: mod_base = gm
  modified_base 3: mod_base = OTHER; note = 2'-O-methyladenosine
  modified_base 4: mod_base = cm
  modified_base 5: mod_base = OTHER; note = 2'-O-methyladenosine
  modified_base 6: mod_base = OTHER; note = 2'-O-methyladenosine
  modified_base 7: mod_base = gm
  modified_base 8: mod_base = gm
  modified_base 9: mod_base = OTHER; note = 2'-fluoroadenosine
  modified_base 10: mod_base = OTHER; note = 2'-fluoroadenosine
  modified_base 11: mod_base = OTHER; note = 2'-fluorocytidine
  modified_base 12: mod_base = um
  modified_base 13: mod_base = gm
  modified_base 14: mod_base = OTHER; note = 2'-O-methyladenosine
  modified_base 15: mod_base = um
  modified_base 16: mod_base = um
  modified_base 17: mod_base = OTHER; note = 2'-O-methyladenosine
  modified_base 18: mod_base = cm
  modified_base 19: mod_base = OTHER; note = 2'-O-methyladenosine
  modified_base 20: mod_base = OTHER; note = 2'-O-methyladenosine
  modified_base 21: mod_base = OTHER; note = 2'-O-methyladenosine
  source 1..21: mol_type = other RNA
ggacaaggaactgattacaaa

SEQ ID NO: 883 - RNA, 21 nt, synthetic construct
  modified_base 1: mod_base = cm
  modified_base 2: mod_base = cm
  modified_base 3: mod_base = OTHER; note = 2'-O-methyladenosine
  modified_base 4: mod_base = cm
  modified_base 5: mod_base = um
  modified_base 6: mod_base = OTHER; note = 2'-O-methyladenosine
  modified_base 7: mod_base = OTHER; note = 2'-O-methyladenosine
  modified_base 8: mod_base = OTHER; note = 2'-O-methyladenosine
  modified_base 9: mod_base = OTHER; note = 2'-fluoroguanosine
  modified_base 10: mod_base = OTHER; note = 2'-fluorocytidine
  modified_base 11: mod_base = OTHER; note = 2'-fluoroadenosine
  modified_base 12: mod_base = um
  modified_base 13: mod_base = OTHER; note = 2'-O-methyladenosine
  modified_base 14: mod_base = cm
  modified_base 15: mod_base = OTHER; note = 2'-O-methyladenosine
  modified_base 16: mod_base = OTHER; note = 2'-O-methyladenosine
  modified_base 17: mod_base = um
  modified_base 18: mod_base = gm
  modified_base 19: mod_base = um
  modified_base 20: mod_base = OTHER; note = 2'-O-methyladenosine
  modified_base 21: mod_base = OTHER; note = 2'-O-methyladenosine
  source 1..21: mol_type = other RNA
ccactaaagcatacaatgtaa

SEQ ID NO: 884 - RNA, 21 nt, synthetic construct
  modified_base 1: mod_base = gm
  modified_base 2: mod_base = um
  modified_base 3: mod_base = cm
  modified_base 4: mod_base = cm
  modified_base 5: mod_base = OTHER; note = 2'-O-methyladenosine
  modified_base 6: mod_base = OTHER; note = 2'-O-methyladenosine
  modified_base 7: mod_base = gm
  modified_base 8: mod_base = OTHER; note = 2'-O-methyladenosine
  modified_base 9: mod_base = OTHER; note = 2'-fluorouridine
  modified_base 10: mod_base = OTHER; note = 2'-fluoroguanosine
  modified_base 11: mod_base = OTHER; note = 2'-fluoroguanosine
  modified_base 12: mod_base = um
  modified_base 13: mod_base = OTHER; note = 2'-O-methyladenosine
  modified_base 14: mod_base = um
  modified_base 15: mod_base = um
  modified_base 16: mod_base = um
  modified_base 17: mod_base = cm
  modified_base 18: mod_base = um
  modified_base 19: mod_base = OTHER; note = 2'-O-methyladenosine
  modified_base 20: mod_base = cm
  modified_base 21: mod_base = um
  source 1..21: mol_type = other RNA
gtccaagatggtatttctact

SEQ ID NO: 885 - RNA, 21 nt, synthetic construct
  modified_base 1: mod_base = gm
  modified_base 2: mod_base = gm
  modified_base 3: mod_base = OTHER; note = 2'-O-methyladenosine
  modified_base 4: mod_base = OTHER; note = 2'-O-methyladenosine
  modified_base 5: mod_base = gm
  modified_base 6: mod_base = um
  modified_base 7: mod_base = OTHER; note = 2'-O-methyladenosine
  modified_base 8: mod_base = gm
  modified_base 9: mod_base = OTHER; note = 2'-fluorouridine
  modified_base 10: mod_base = gm
  modified_base 11: mod_base = OTHER; note = 2'-fluoroguanosine
  modified_base 12: mod_base = OTHER; note = 2'-O-methyladenosine
  modified_base 13: mod_base = OTHER; note = 2'-fluoroadenosine
  modified_base 14: mod_base = OTHER; note = 2'-O-methyladenosine
  modified_base 15: mod_base = OTHER; note = 2'-O-methyladenosine
  modified_base 16: mod_base = um
  modified_base 17: mod_base = cm
  modified_base 18: mod_base = cm
  modified_base 19: mod_base = um
  modified_base 20: mod_base = OTHER; note = 2'-O-methyladenosine
  modified_base 21: mod_base = OTHER; note = 2'-O-methyladenosine
  source 1..21: mol_type = other RNA
ggaagtagtggaaaatcctaa

SEQ ID NO: 886 - RNA, 21 nt, synthetic construct
  modified_base 1: mod_base = cm
  modified_base 2: mod_base = gm
  modified_base 3: mod_base = OTHER; note = 2'-O-methyladenosine
  modified_base 4: mod_base = OTHER; note = 2'-O-methyladenosine
  modified_base 5: mod_base = gm
  modified_base 6: mod_base = um
  modified_base 7: mod_base = OTHER; note = 2'-O-methyladenosine
  modified_base 8: mod_base = gm
  modified_base 9: mod_base = OTHER; note = 2'-fluorouridine
  modified_base 10: mod_base = gm
  modified_base 11: mod_base = OTHER; note = 2'-fluoroguanosine
  modified_base 12: mod_base = OTHER; note = 2'-O-methyladenosine
  modified_base 13: mod_base = OTHER; note = 2'-fluoroadenosine
  modified_base 14: mod_base = OTHER; note = 2'-O-methyladenosine
  modified_base 15: mod_base = OTHER; note = 2'-O-methyladenosine
  modified_base 16: mod_base = um
  modified_base 17: mod_base = cm
  modified_base 18: mod_base = cm
  modified_base 19: mod_base = um
  modified_base 20: mod_base = OTHER; note = 2'-O-methyladenosine
  modified_base 21: mod_base = OTHER; note = 2'-O-methyladenosine
  source 1..21: mol_type = other RNA
cgaagtagtggaaaatcctaa

SEQ ID NO: 887 - RNA, 21 nt, synthetic construct
  modified_base 1: mod_base = cm
  modified_base 2: mod_base = OTHER; note = 2'-O-methyladenosine
  modified_base 3: mod_base = um
  modified_base 4: mod_base = OTHER; note = 2'-O-methyladenosine
  modified_base 5: mod_base = cm
  modified_base 6: mod_base = OTHER; note = 2'-O-methyladenosine
  modified_base 7: mod_base = OTHER; note = 2'-O-methyladenosine
  modified_base 8: mod_base = um
  modified_base 9: mod_base = OTHER; note = 2'-fluoroguanosine
  modified_base 10: mod_base = cm
  modified_base 11: mod_base = OTHER; note = 2'-fluorouridine
  modified_base 12: mod_base = OTHER; note = 2'-O-methyladenosine
  modified_base 13: mod_base = OTHER; note = 2'-fluoroguanosine
  modified_base 14: mod_base = um
  modified_base 15: mod_base = um
  modified_base 16: mod_base = OTHER; note = 2'-O-methyladenosine
  modified_base 17: mod_base = OTHER; note = 2'-O-methyladenosine
  modified_base 18: mod_base = OTHER; note = 2'-O-methyladenosine
  modified_base 19: mod_base = cm
  modified_base 20: mod_base = OTHER; note = 2'-O-methyladenosine
  modified_base 21: mod_base = OTHER; note = 2'-O-methyladenosine
  source 1..21: mol_type = other RNA
catacaatgctagttaaacaa

SEQ ID NO: 888 - RNA, 21 nt, synthetic construct
  modified_base 1: mod_base = cm
  modified_base 2: mod_base = gm
  modified_base 3: mod_base = um
  modified_base 4: mod_base = OTHER; note = 2'-O-methyladenosine
  modified_base 5: mod_base = cm
  modified_base 6: mod_base = OTHER; note = 2'-O-methyladenosine
  modified_base 7: mod_base = OTHER; note = 2'-O-methyladenosine
  modified_base 8: mod_base = um
  modified_base 9: mod_base = OTHER; note = 2'-fluoroguanosine
  modified_base 10: mod_base = cm
  modified_base 11: mod_base = OTHER; note = 2'-fluorouridine
  modified_base 12: mod_base = OTHER; note = 2'-O-methyladenosine
  modified_base 13: mod_base = OTHER; note = 2'-fluoroguanosine
  modified_base 14: mod_base = um
  modified_base 15: mod_base = um
  modified_base 16: mod_base = OTHER; note = 2'-O-methyladenosine
  modified_base 17: mod_base = OTHER; note = 2'-O-methyladenosine
  modified_base 18: mod_base = OTHER; note = 2'-O-methyladenosine
  modified_base 19: mod_base = cm
  modified_base 20: mod_base = OTHER; note = 2'-O-methyladenosine
  modified_base 21: mod_base = OTHER; note = 2'-O-methyladenosine
  source 1..21: mol_type = other RNA
cgtacaatgctagttaaacaa

SEQ ID NO: 889 - RNA, 21 nt, synthetic construct
  modified_base 1: mod_base = gm
  modified_base 2: mod_base = um
  modified_base 3: mod_base = cm
  modified_base 4: mod_base = cm
  modified_base 5: mod_base = OTHER; note = 2'-O-methyladenosine
  modified_base 6: mod_base = OTHER; note = 2'-O-methyladenosine
  modified_base 7: mod_base = gm
  modified_base 8: mod_base = OTHER; note = 2'-O-methyladenosine
  modified_base 9: mod_base = OTHER; note = 2'-fluorouridine
  modified_base 10: mod_base = gm
  modified_base 11: mod_base = OTHER; note = 2'-fluoroguanosine
  modified_base 12: mod_base = um
  modified_base 13: mod_base = OTHER; note = 2'-fluoroadenosine
  modified_base 14: mod_base = um
  modified_base 15: mod_base = um
  modified_base 16: mod_base = um
  modified_base 17: mod_base = cm
  modified_base 18: mod_base = um
  modified_base 19: mod_base = OTHER; note = 2'-O-methyladenosine
  modified_base 20: mod_base = cm
  modified_base 21: mod_base = um
  source 1..21: mol_type = other RNA
gtccaagatggtatttctact

SEQ ID NO: 890 - RNA, 21 nt, synthetic construct
  modified_base 1: mod_base = gm
  modified_base 2: mod_base = um
  modified_base 3: mod_base = cm
  modified_base 4: mod_base = cm
  modified_base 5: mod_base = OTHER; note = 2'-O-methyladenosine
  modified_base 6: mod_base = OTHER; note = 2'-O-methyladenosine
  modified_base 7: mod_base = gm
  modified_base 8: mod_base = OTHER; note = 2'-O-methyladenosine
  modified_base 9: mod_base = OTHER; note = 2'-fluorouridine
  modified_base 10: mod_base = gm
  modified_base 11: mod_base = OTHER; note = 2'-fluoroguanosine
  modified_base 12: mod_base = um
  modified_base 13: mod_base = OTHER; note = 2'-fluoroadenosine
  modified_base 14: mod_base = um
  modified_base 15: mod_base = um
  modified_base 16: mod_base = um
  modified_base 17: mod_base = cm
  modified_base 18: mod_base = um
  modified_base 19: mod_base = OTHER; note = 2'-O-methyladenosine
  modified_base 20: mod_base = cm
  modified_base 21: mod_base = OTHER; note = 2'-O-methyladenosine
  source 1..21: mol_type = other RNA
gtccaagatggtatttctaca

SEQ ID NO: 891 - RNA, 21 nt, synthetic construct
  modified_base 1: mod_base = gm
  modified_base 2: mod_base = gm
  modified_base 3: mod_base = OTHER; note = 2'-O-methyladenosine
  modified_base 4: mod_base = cm
  modified_base 5: mod_base = OTHER; note = 2'-O-methyladenosine
  modified_base 6: mod_base = OTHER; note = 2'-O-methyladenosine
  modified_base 7: mod_base = gm
  modified_base 8: mod_base = gm
  modified_base 9: mod_base = OTHER; note = 2'-fluoroadenosine
  modified_base 10: mod_base = OTHER; note = 2'-O-methyladenosine
  modified_base 11: mod_base = OTHER; note = 2'-fluorocytidine
  modified_base 12: mod_base = um
  modified_base 13: mod_base = OTHER; note = 2'-fluoroguanosine
  modified_base 14: mod_base = OTHER; note = 2'-O-methyladenosine
  modified_base 15: mod_base = um
  modified_base 16: mod_base = um
  modified_base 17: mod_base = OTHER; note = 2'-O-methyladenosine
  modified_base 18: mod_base = cm
  modified_base 19: mod_base = OTHER; note = 2'-O-methyladenosine
  modified_base 20: mod_base = OTHER; note = 2'-O-methyladenosine
  modified_base 21: mod_base = OTHER; note = 2'-O-methyladenosine
  source 1..21: mol_type = other RNA
ggacaaggaactgattacaaa

SEQ ID NO: 892 - RNA, 21 nt, synthetic construct
  modified_base 1: mod_base = cm
  modified_base 2: mod_base = gm
  modified_base 3: mod_base = OTHER; note = 2'-O-methyladenosine
  modified_base 4: mod_base = cm
  modified_base 5: mod_base = OTHER; note = 2'-O-methyladenosine
  modified_base 6: mod_base = OTHER; note = 2'-O-methyladenosine
  modified_base 7: mod_base = gm
  modified_base 8: mod_base = gm
  modified_base 9: mod_base = OTHER; note = 2'-fluoroadenosine
  modified_base 10: mod_base = OTHER; note = 2'-O-methyladenosine
  modified_base 11: mod_base = OTHER; note = 2'-fluorocytidine
  modified_base 12: mod_base = um
  modified_base 13: mod_base = OTHER; note = 2'-fluoroguanosine
  modified_base 14: mod_base = OTHER; note = 2'-O-methyladenosine
  modified_base 15: mod_base = um
  modified_base 16: mod_base = um
  modified_base 17: mod_base = OTHER; note = 2'-O-methyladenosine
  modified_base 18: mod_base = cm
  modified_base 19: mod_base = OTHER; note = 2'-O-methyladenosine
  modified_base 20: mod_base = OTHER; note = 2'-O-methyladenosine
  modified_base 21: mod_base = OTHER; note = 2'-O-methyladenosine
  source 1..21: mol_type = other RNA
cgacaaggaactgattacaaa

SEQ ID NO: 893 - RNA, 21 nt, synthetic construct
  modified_base 1: mod_base = cm
  modified_base 2: mod_base = OTHER; note = 2'-O-methyladenosine
  modified_base 3: mod_base = um
  modified_base 4: mod_base = OTHER; note = 2'-O-methyladenosine
  modified_base 5: mod_base = OTHER; note = 2'-O-methyladenosine
  modified_base 6: mod_base = um
  modified_base 7: mod_base = cm
  modified_base 8: mod_base = OTHER; note = 2'-O-methyladenosine
  modified_base 9: mod_base = OTHER; note = 2'-fluoroguanosine
  modified_base 10: mod_base = OTHER; note = 2'-fluoroguanosine
  modified_base 11: mod_base = OTHER; note = 2'-fluoroadenosine
  modified_base 12: mod_base = um
  modified_base 13: mod_base = gm
  modified_base 14: mod_base = um
  modified_base 15: mod_base = OTHER; note = 2'-O-methyladenosine
  modified_base 16: mod_base = OTHER; note = 2'-O-methyladenosine
  modified_base 17: mod_base = OTHER; note = 2'-O-methyladenosine
  modified_base 18: mod_base = cm
  modified_base 19: mod_base = um
  modified_base 20: mod_base = um
  modified_base 21: mod_base = OTHER; note = 2'-O-methyladenosine
  source 1..21: mol_type = other RNA
cataatcaggatgtaaactta

SEQ ID NO: 894 - RNA, 21 nt, synthetic construct
  modified_base 1: mod_base = cm
  modified_base 2: mod_base = OTHER; note = 2'-O-methyladenosine
  modified_base 3: mod_base = um
  modified_base 4: mod_base = OTHER; note = 2'-O-methyladenosine
  modified_base 5: mod_base = OTHER; note = 2'-O-methyladenosine
  modified_base 6: mod_base = um
  modified_base 7: mod_base = cm
  modified_base 8: mod_base = OTHER; note = 2'-O-methyladenosine
  modified_base 9: mod_base = OTHER; note = 2'-fluoroguanosine
  modified_base 10: mod_base = gm
  modified_base 11: mod_base = OTHER; note = 2'-fluoroadenosine
  modified_base 12: mod_base = um
  modified_base 13: mod_base = OTHER; note = 2'-fluoroguanosine
  modified_base 14: mod_base = um
  modified_base 15: mod_base = OTHER; note = 2'-O-methyladenosine
  modified_base 16: mod_base = OTHER; note = 2'-O-methyladenosine
  modified_base 17: mod_base = OTHER; note = 2'-O-methyladenosine
  modified_base 18: mod_base = cm
  modified_base 19: mod_base = um
  modified_base 20: mod_base = um
  modified_base 21: mod_base = OTHER; note = 2'-O-methyladenosine
  source 1..21: mol_type = other RNA
cataatcaggatgtaaactta

SEQ ID NO: 895 - RNA, 21 nt, synthetic construct
  modified_base 1: mod_base = cm
  modified_base 2: mod_base = gm
  modified_base 3: mod_base = um
  modified_base 4: mod_base = OTHER; note = 2'-O-methyladenosine
  modified_base 5: mod_base = OTHER; note = 2'-O-methyladenosine
  modified_base 6: mod_base = um
  modified_base 7: mod_base = cm
  modified_base 8: mod_base = OTHER; note = 2'-O-methyladenosine
  modified_base 9: mod_base = OTHER; note = 2'-fluoroguanosine
  modified_base 10: mod_base = gm
  modified_base 11: mod_base = OTHER; note = 2'-fluoroadenosine
  modified_base 12: mod_base = um
  modified_base 13: mod_base = OTHER; note = 2'-fluoroguanosine
  modified_base 14: mod_base = um
  modified_base 15: mod_base = OTHER; note = 2'-O-methyladenosine
  modified_base 16: mod_base = OTHER; note = 2'-O-methyladenosine
  modified_base 17: mod_base = OTHER; note = 2'-O-methyladenosine
  modified_base 18: mod_base = cm
  modified_base 19: mod_base = um
  modified_base 20: mod_base = um
  modified_base 21: mod_base = OTHER; note = 2'-O-methyladenosine
  source 1..21: mol_type = other RNA
cgtaatcaggatgtaaactta

SEQ ID NO: 896 - RNA, 21 nt, synthetic construct
  modified_base 1: mod_base = gm
  modified_base 2: mod_base = gm
  modified_base 3: mod_base = OTHER; note = 2'-O-methyladenosine
  modified_base 4: mod_base = um
  modified_base 5: mod_base = gm
  modified_base 6: mod_base = um
  modified_base 7: mod_base = OTHER; note = 2'-O-methyladenosine
  modified_base 8: mod_base = OTHER; note = 2'-O-methyladenosine
  modified_base 9: mod_base = OTHER; note = 2'-fluoroadenosine
  modified_base 10: mod_base = OTHER; note = 2'-fluorocytidine
  modified_base 11: mod_base = OTHER; note = 2'-fluorouridine
  modified_base 12: mod_base = um
  modified_base 13: mod_base = OTHER; note = 2'-O-methyladenosine
  modified_base 14: mod_base = cm
  modified_base 15: mod_base = OTHER; note = 2'-O-methyladenosine
  modified_base 16: mod_base = um
  modified_base 17: mod_base = OTHER; note = 2'-O-methyladenosine
  modified_base 18: mod_base = gm
  modified_base 19: mod_base = cm
  modified_base 20: mod_base = um
  modified_base 21: mod_base = OTHER; note = 2'-O-methyladenosine
  source 1..21: mol_type = other RNA
ggatgtaaacttacatagcta

SEQ ID NO: 897 - RNA, 21 nt, synthetic construct
  modified_base 1: mod_base = gm
  modified_base 2: mod_base = gm
  modified_base 3: mod_base = OTHER; note = 2'-O-methyladenosine
  modified_base 4: mod_base = um
  modified_base 5: mod_base = gm
  modified_base 6: mod_base = um
  modified_base 7: mod_base = OTHER; note = 2'-O-methyladenosine
  modified_base 8: mod_base = OTHER; note = 2'-O-methyladenosine
  modified_base 9: mod_base = OTHER; note = 2'-fluoroadenosine
  modified_base 10: mod_base = cm
  modified_base 11: mod_base = OTHER; note = 2'-fluorouridine
  modified_base 12: mod_base = um
  modified_base 13: mod_base = OTHER; note = 2'-fluoroadenosine
  modified_base 14: mod_base = cm
  modified_base 15: mod_base = OTHER; note = 2'-O-methyladenosine
  modified_base 16: mod_base = um
  modified_base 17: mod_base = OTHER; note = 2'-O-methyladenosine
  modified_base 18: mod_base = gm
  modified_base 19: mod_base = cm
  modified_base 20: mod_base = um
  modified_base 21: mod_base = OTHER; note = 2'-O-methyladenosine
  source 1..21: mol_type = other RNA
ggatgtaaacttacatagcta

SEQ ID NO: 898 - RNA, 21 nt, synthetic construct
  modified_base 1: mod_base = gm
  modified_base 2: mod_base = cm
  modified_base 3: mod_base = OTHER; note = 2'-O-methyladenosine
  modified_base 4: mod_base = cm
  modified_base 5: mod_base = cm
  modified_base 6: mod_base = um
  modified_base 7: mod_base = um
  modified_base 8: mod_base = um
  modified_base 9: mod_base = OTHER; note = 2'-fluoroguanosine
  modified_base 10: mod_base = OTHER; note = 2'-O-methyladenosine
  modified_base 11: mod_base = OTHER; note = 2'-fluorocytidine
  modified_base 12: mod_base = OTHER; note = 2'-O-methyladenosine
  modified_base 13: mod_base = OTHER; note = 2'-fluoroadenosine
  modified_base 14: mod_base = um
  modified_base 15: mod_base = cm
  modified_base 16: mod_base = um
  modified_base 17: mod_base = um
  modified_base 18: mod_base = OTHER; note = 2'-O-methyladenosine
  modified_base 19: mod_base = OTHER; note = 2'-O-methyladenosine
  modified_base 20: mod_base = gm
  modified_base 21: mod_base = OTHER; note = 2'-O-methyladenosine
  source 1..21: mol_type = other RNA
gcacctttgacaatcttaaga

SEQ ID NO: 899 - RNA, 21 nt, synthetic construct
  modified_base 1: mod_base = um
  modified_base 2: mod_base = gm
  modified_base 3: mod_base = cm
  modified_base 4: mod_base = um
  modified_base 5: mod_base = gm
  modified_base 6: mod_base = um
  modified_base 7: mod_base = gm
  modified_base 8: mod_base = gm
  modified_base 9: mod_base = OTHER; note = 2'-fluorouridine
  modified_base 10: mod_base = OTHER; note = 2'-fluorouridine
  modified_base 11: mod_base = OTHER; note = 2'-fluoroadenosine
  modified_base 12: mod_base = um
  modified_base 13: mod_base = OTHER; note = 2'-O-methyladenosine
  modified_base 14: mod_base = cm
  modified_base 15: mod_base = cm
  modified_base 16: mod_base = um
  modified_base 17: mod_base = OTHER; note = 2'-O-methyladenosine
  modified_base 18: mod_base = cm
  modified_base 19: mod_base = um
  modified_base 20: mod_base = OTHER; note = 2'-O-methyladenosine
  modified_base 21: mod_base = OTHER; note = 2'-O-methyladenosine
  source 1..21: mol_type = other RNA
tgctgtggttatacctactaa

SEQ ID NO: 900 - RNA, 21 nt, synthetic construct
  modified_base 1: mod_base = gm
  modified_base 2: mod_base = OTHER; note = 2'-O-methyladenosine
  modified_base 3: mod_base = cm
  modified_base 4: mod_base = OTHER; note = 2'-O-methyladenosine
  modified_base 5: mod_base = OTHER; note = 2'-O-methyladenosine
  modified_base 6: mod_base = um
  modified_base 7: mod_base = cm
  modified_base 8: mod_base = um
  modified_base 9: mod_base = OTHER; note = 2'-fluorouridine
  modified_base 10: mod_base = OTHER; note = 2'-fluoroadenosine
  modified_base 11: mod_base = OTHER; note = 2'-fluoroadenosine
  modified_base 12: mod_base = gm
  modified_base 13: mod_base = OTHER; note = 2'-O-methyladenosine
  modified_base 14: mod_base = cm
  modified_base 15: mod_base = OTHER; note = 2'-O-methyladenosine
  modified_base 16: mod_base = cm
  modified_base 17: mod_base = um
  modified_base 18: mod_base = um
  modified_base 19: mod_base = cm
  modified_base 20: mod_base = um
  modified_base 21: mod_base = um
  source 1..21: mol_type = other RNA
gacaatcttaagacacttctt

SEQ ID NO: 901 - RNA, 21 nt, synthetic construct
  modified_base 1: mod_base = cm
  modified_base 2: mod_base = OTHER; note = 2'-O-methyladenosine
  modified_base 3: mod_base = um
  modified_base 4: mod_base = gm
  modified_base 5: mod_base = gm
  modified_base 6: mod_base = gm
  modified_base 7: mod_base = cm
  modified_base 8: mod_base = OTHER; note = 2'-O-methyladenosine
  modified_base 9: mod_base = OTHER; note = 2'-fluorocytidine
  modified_base 10: mod_base = OTHER; note = 2'-fluoroadenosine
  modified_base 11: mod_base = OTHER; note = 2'-fluorocytidine
  modified_base 12: mod_base = um
  modified_base 13: mod_base = um
  modified_base 14: mod_base = um
  modified_base 15: mod_base = cm
  modified_base 16: mod_base = um
  modified_base 17: mod_base = um
  modified_base 18: mod_base = OTHER; note = 2'-O-methyladenosine
  modified_base 19: mod_base = um
  modified_base 20: mod_base = gm
  modified_base 21: mod_base = OTHER; note = 2'-O-methyladenosine
  source 1..21: mol_type = other RNA
catgggcacactttcttatga

SEQ ID NO: 902 - RNA, 21 nt, synthetic construct
  modified_base 1: mod_base = OTHER; note = 2'-O-methyladenosine
  modified_base 2: mod_base = cm
  modified_base 3: mod_base = OTHER; note = 2'-O-methyladenosine
  modified_base 4: mod_base = gm
  modified_base 5: mod_base = OTHER; note = 2'-O-methyladenosine
  modified_base 6: mod_base = OTHER; note = 2'-O-methyladenosine
  modified_base 7: mod_base = OTHER; note = 2'-O-methyladenosine
  modified_base 8: mod_base = um
  modified_base 9: mod_base = OTHER; note = 2'-fluorouridine
  modified_base 10: mod_base = OTHER; note = 2'-fluoroguanosine
  modified_base 11: mod_base = OTHER; note = 2'-fluoroadenosine
  modified_base 12: mod_base = cm
  modified_base 13: mod_base = cm
  modified_base 14: mod_base = cm
  modified_base 15: mod_base = um
  modified_base 16: mod_base = OTHER; note = 2'-O-methyladenosine
  modified_base 17: mod_base = OTHER; note = 2'-O-methyladenosine
  modified_base 18: mod_base = gm
  modified_base 19: mod_base = um
  modified_base 20: mod_base = um
  modified_base 21: mod_base = OTHER; note = 2'-O-methyladenosine
  source 1..21: mol_type = other RNA
acagaaattgaccctaagtta

SEQ ID NO: 903 - RNA, 21 nt, synthetic construct
  modified_base 1: mod_base = gm
  modified_base 2: mod_base = OTHER; note = 2'-O-methyladenosine
  modified_base 3: mod_base = um
  modified_base 4: mod_base = gm
  modified_base 5: mod_base = cm
  modified_base 6: mod_base = um
  modified_base 7: mod_base = um
  modified_base 8: mod_base = OTHER; note = 2'-O-methyladenosine
  modified_base 9: mod_base = OTHER; note = 2'-fluorocytidine
  modified_base 10: mod_base = OTHER; note = 2'-fluoroguanosine
  modified_base 11: mod_base = OTHER; note = 2'-fluorouridine
  modified_base 12: mod_base = um
  modified_base 13: mod_base = OTHER; note = 2'-O-methyladenosine
  modified_base 14: mod_base = OTHER; note = 2'-O-methyladenosine
  modified_base 15: mod_base = um
  modified_base 16: mod_base = OTHER; note = 2'-O-methyladenosine
  modified_base 17: mod_base = cm
  modified_base 18: mod_base = gm
  modified_base 19: mod_base = um
  modified_base 20: mod_base = um
  modified_base 21: mod_base = um
  source 1..21: mol_type = other RNA
gatgcttacgttaatacgttt

SEQ ID NO: 904 - RNA, 21 nt, synthetic construct
  modified_base 1: mod_base = cm
  modified_base 2: mod_base = OTHER; note = 2'-O-methyladenosine
  modified_base 3: mod_base = OTHER; note = 2'-O-methyladenosine
  modified_base 4: mod_base = gm
  modified_base 5: mod_base = cm
  modified_base 6: mod_base = um
  modified_base 7: mod_base = OTHER; note = 2'-O-methyladenosine
  modified_base 8: mod_base = um
  modified_base 9: mod_base = OTHER; note = 2'-fluoroguanosine
  modified_base 10: mod_base = OTHER; note = 2'-fluoroadenosine
  modified_base 11: mod_base = OTHER; note = 2'-fluorocytidine
  modified_base 12: mod_base = cm
  modified_base 13: mod_base = cm
  modified_base 14: mod_base = OTHER; note = 2'-O-methyladenosine
  modified_base 15: mod_base = OTHER; note = 2'-O-methyladenosine
  modified_base 16: mod_base = OTHER; note = 2'-O-methyladenosine
  modified_base 17: mod_base = um
  modified_base 18: mod_base = gm
  modified_base 19: mod_base = um
  modified_base 20: mod_base = OTHER; note = 2'-O-methyladenosine
  modified_base 21: mod_base = um
  source 1..21: mol_type = other RNA
caagctatgacccaaatgtat

SEQ ID NO: 905 - RNA, 21 nt, synthetic construct
  modified_base 1: mod_base = um
  modified_base 2: mod_base = gm
  modified_base 3: mod_base = um
  modified_base 4: mod_base = cm
  modified_base 5: mod_base = gm
  modified_base 6: mod_base = OTHER; note = 2'-O-methyladenosine
  modified_base 7: mod_base = um
  modified_base 8: mod_base = um
  modified_base 9: mod_base = OTHER; note = 2'-fluorocytidine
  modified_base 10: mod_base = OTHER; note = 2'-fluoroadenosine
  modified_base 11: mod_base = OTHER; note = 2'-fluoroguanosine
  modified_base 12: mod_base = OTHER; note = 2'-O-methyladenosine
  modified_base 13: mod_base = um
  modified_base 14: mod_base = cm
  modified_base 15: mod_base = um
  modified_base 16: mod_base = um
  modified_base 17: mod_base = OTHER; note = 2'-O-methyladenosine
  modified_base 18: mod_base = OTHER; note = 2'-O-methyladenosine
  modified_base 19: mod_base = um
  modified_base 20: mod_base = gm
  modified_base 21: mod_base = OTHER; note = 2'-O-methyladenosine
  source 1..21: mol_type = other RNA
tgtcgattcagatcttaatga

SEQ ID NO: 906 - RNA, 21 nt, synthetic construct
  modified_base 1: mod_base = gm
  modified_base 2: mod_base = cm
  modified_base 3: mod_base = um
  modified_base 4: mod_base = um
  modified_base 5: mod_base = gm
  modified_base 6: mod_base = cm
  modified_base 7: mod_base = um
  modified_base 8: mod_base = um
  modified_base 9: mod_base = OTHER; note = 2'-fluorouridine
  modified_base 10: mod_base = OTHER; note = 2'-fluorocytidine
  modified_base 11: mod_base = OTHER; note = 2'-fluoroguanosine
  modified_base 12: mod_base = um
  modified_base 13: mod_base = gm
  modified_base 14: mod_base = gm
  modified_base 15: mod_base = um
  modified_base 16: mod_base = OTHER; note = 2'-O-methyladenosine
  modified_base 17: mod_base = um
  modified_base 18: mod_base = um
  modified_base 19: mod_base = cm
  modified_base 20: mod_base = um
  modified_base 21: mod_base = um
  source 1..21: mol_type = other RNA
gcttgctttcgtggtattctt

SEQ ID NO: 907 - RNA, 21 nt, synthetic construct
  modified_base 1: mod_base = OTHER; note = 2'-O-methyladenosine
  modified_base 2: mod_base = gm
  modified_base 3: mod_base = OTHER; note = 2'-O-methyladenosine
  modified_base 4: mod_base = cm
  modified_base 5: mod_base = OTHER; note = 2'-O-methyladenosine
  modified_base 6: mod_base = OTHER; note = 2'-O-methyladenosine
  modified_base 7: mod_base = gm
  modified_base 8: mod_base = gm
  modified_base 9: mod_base = OTHER; note = 2'-fluoroadenosine
  modified_base 10: mod_base = OTHER; note = 2'-O-methyladenosine
  modified_base 11: mod_base = OTHER; note = 2'-fluorocytidine
  modified_base 12: mod_base = um
  modified_base 13: mod_base = OTHER; note = 2'-fluoroguanosine
  modified_base 14: mod_base = OTHER; note = 2'-O-methyladenosine
  modified_base 15: mod_base = um
  modified_base 16: mod_base = um
  modified_base 17: mod_base = OTHER; note = 2'-O-methyladenosine
  modified_base 18: mod_base = cm
  modified_base 19: mod_base = OTHER; note = 2'-O-methyladenosine
  modified_base 20: mod_base = OTHER; note = 2'-O-methyladenosine
  modified_base 21: mod_base = OTHER; note = 2'-O-methyladenosine
  source 1..21: mol_type = other RNA
agacaaggaactgattacaaa

SEQ ID NO: 908 - RNA, 21 nt, synthetic construct
  modified_base 1: mod_base = cm
  modified_base 2: mod_base = gm
  modified_base 3: mod_base = um
  modified_base 4: mod_base = OTHER; note = 2'-O-methyladenosine
  modified_base 5: mod_base = OTHER; note = 2'-O-methyladenosine
  modified_base 6: mod_base = um
  modified_base 7: mod_base = cm
  modified_base 8: mod_base = OTHER; note = 2'-O-methyladenosine
  modified_base 9: mod_base = OTHER; note = 2'-fluoroguanosine
  modified_base 10: mod_base = OTHER; note = 2'-fluoroguanosine
  modified_base 11: mod_base = OTHER; note = 2'-fluoroadenosine
  modified_base 12: mod_base = um
  modified_base 13: mod_base = gm
  modified_base 14: mod_base = um
  modified_base 15: mod_base = OTHER; note = 2'-O-methyladenosine
  modified_base 16: mod_base = OTHER; note = 2'-O-methyladenosine
  modified_base 17: mod_base = OTHER; note = 2'-O-methyladenosine
  modified_base 18: mod_base = cm
  modified_base 19: mod_base = um
  modified_base 20: mod_base = um
  modified_base 21: mod_base = OTHER; note = 2'-O-methyladenosine
  source 1..21: mol_type = other RNA
cgtaatcaggatgtaaactta

SEQ ID NO: 909 - RNA, 21 nt, synthetic construct
  modified_base 1: mod_base = cm
  modified_base 1^2: mod_base = OTHER; note = phosphorothioate linkage
  modified_base 2: mod_base = gm
  modified_base 3: mod_base = OTHER; note = 2'-O-methyladenosine
  modified_base 4: mod_base = OTHER; note = 2'-O-methyladenosine
  modified_base 5: mod_base = gm
  modified_base 6: mod_base = um
  modified_base 7: mod_base = OTHER; note = 2'-O-methyladenosine
  modified_base 8: mod_base = gm
  modified_base 9: mod_base = OTHER; note = 2'-fluorouridine
  modified_base 10: mod_base = gm
  modified_base 11: mod_base = OTHER; note = 2'-fluoroguanosine
  modified_base 12: mod_base = OTHER; note = 2'-O-methyladenosine
  modified_base 13: mod_base = OTHER; note = 2'-fluoroadenosine
  modified_base 14: mod_base = OTHER; note = 2'-O-methyladenosine
  modified_base 15: mod_base = OTHER; note = 2'-O-methyladenosine
  modified_base 16: mod_base = um
  modified_base 17: mod_base = cm
  modified_base 18: mod_base = cm
  modified_base 19: mod_base = um
  modified_base 20: mod_base = OTHER; note = 2'-O-methyladenosine
  modified_base 21: mod_base = OTHER; note = 2'-O-methyladenosine
  source 1..21: mol_type = other RNA
cgaagtagtggaaaatcctaa

SEQ ID NO: 910 - RNA, 21 nt, synthetic construct
  modified_base 1: mod_base = gm
  modified_base 1^2: mod_base = OTHER; note = phosphorothioate linkage
  modified_base 2: mod_base = gm
  modified_base 3: mod_base = OTHER; note = 2'-O-methyladenosine
  modified_base 4: mod_base = cm
  modified_base 5: mod_base = OTHER; note = 2'-O-methyladenosine
  modified_base 6: mod_base = OTHER; note = 2'-O-methyladenosine
  modified_base 7: mod_base = gm
  modified_base 8: mod_base = gm
  modified_base 9: mod_base = OTHER; note = 2'-fluoroadenosine
  modified_base 10: mod_base = OTHER; note = 2'-O-methyladenosine
  modified_base 11: mod_base = OTHER; note = 2'-fluorocytidine
  modified_base 12: mod_base = um
  modified_base 13: mod_base = OTHER; note = 2'-fluoroguanosine
  modified_base 14: mod_base = OTHER; note = 2'-O-methyladenosine
  modified_base 15: mod_base = um
  modified_base 16: mod_base = um
  modified_base 17: mod_base = OTHER; note = 2'-O-methyladenosine
  modified_base 18: mod_base = cm
  modified_base 19: mod_base = OTHER; note = 2'-O-methyladenosine
  modified_base 20: mod_base = OTHER; note = 2'-O-methyladenosine
  modified_base 21: mod_base = OTHER; note = 2'-O-methyladenosine
  source 1..21: mol_type = other RNA
ggacaaggaactgattacaaa

SEQ ID NO: 911 - RNA, 21 nt, synthetic construct
  modified_base 1: mod_base = um
  modified_base 1^2: mod_base = OTHER; note = phosphorothioate linkage
  modified_base 2: mod_base = gm
  modified_base 3: mod_base = cm
  modified_base 4: mod_base = um
  modified_base 5: mod_base = gm
  modified_base 6: mod_base = um
  modified_base 7: mod_base = gm
  modified_base 8: mod_base = gm
  modified_base 9: mod_base = OTHER; note = 2'-fluorouridine
  modified_base 10: mod_base = OTHER; note = 2'-fluorouridine
  modified_base 11: mod_base = OTHER; note = 2'-fluoroadenosine
  modified_base 12: mod_base = um
  modified_base 13: mod_base = OTHER; note = 2'-O-methyladenosine
  modified_base 14: mod_base = cm
  modified_base 15: mod_base = cm
  modified_base 16: mod_base = um
  modified_base 17: mod_base = OTHER; note = 2'-O-methyladenosine
  modified_base 18: mod_base = cm
  modified_base 19: mod_base = um
  modified_base 20: mod_base = OTHER; note = 2'-O-methyladenosine
  modified_base 21: mod_base = OTHER; note = 2'-O-methyladenosine
  source 1..21: mol_type = other RNA
tgctgtggttatacctactaa

SEQ ID NO: 912 - RNA, 21 nt, synthetic construct
  modified_base 1: mod_base = cm
  modified_base 1^2: mod_base = OTHER; note = phosphorothioate linkage
  modified_base 2: mod_base = OTHER; note = 2'-O-methyladenosine
  modified_base 3: mod_base = um
  modified_base 4: mod_base = OTHER; note = 2'-O-methyladenosine
  modified_base 5: mod_base = cm
  modified_base 6: mod_base = OTHER; note = 2'-O-methyladenosine
  modified_base 7: mod_base = OTHER; note = 2'-O-methyladenosine
  modified_base 8: mod_base = um
  modified_base 9: mod_base = OTHER; note = 2'-fluoroguanosine
  modified_base 10: mod_base = cm
  modified_base 11: mod_base = OTHER; note = 2'-fluorouridine
  modified_base 12: mod_base = OTHER; note = 2'-O-methyladenosine
  modified_base 13: mod_base = OTHER; note = 2'-fluoroguanosine
  modified_base 14: mod_base = um
  modified_base 15: mod_base = um
  modified_base 16: mod_base = OTHER; note = 2'-O-methyladenosine
  modified_base 17: mod_base = OTHER; note = 2'-O-methyladenosine
  modified_base 18: mod_base = OTHER; note = 2'-O-methyladenosine
  modified_base 19: mod_base = cm
  modified_base 20: mod_base = OTHER; note = 2'-O-methyladenosine
  modified_base 21: mod_base = OTHER; note = 2'-O-methyladenosine
  source 1..21: mol_type = other RNA
catacaatgctagttaaacaa

SEQ ID NO: 913 - RNA, 21 nt, synthetic construct
  modified_base 1: mod_base = cm
  modified_base 1^2: mod_base = OTHER; note = phosphorothioate linkage
  modified_base 2: mod_base = gm
  modified_base 3: mod_base = um
  modified_base 4: mod_base = OTHER; note = 2'-O-methyladenosine
  modified_base 5: mod_base = OTHER; note = 2'-O-methyladenosine
  modified_base 6: mod_base = um
  modified_base 7: mod_base = cm
  modified_base 8: mod_base = OTHER; note = 2'-O-methyladenosine
  modified_base 9: mod_base = OTHER; note = 2'-fluoroguanosine
  modified_base 10: mod_base = gm
  modified_base 11: mod_base = OTHER; note = 2'-fluoroadenosine
  modified_base 12: mod_base = um
  modified_base 13: mod_base = OTHER; note = 2'-fluoroguanosine
  modified_base 14: mod_base = um
  modified_base 15: mod_base = OTHER; note = 2'-O-methyladenosine
  modified_base 16: mod_base = OTHER; note = 2'-O-methyladenosine
  modified_base 17: mod_base = OTHER; note = 2'-O-methyladenosine
  modified_base 18: mod_base = cm
  modified_base 19: mod_base = um
  modified_base 20: mod_base = um
  modified_base 21: mod_base = OTHER; note = 2'-O-methyladenosine
  source 1..21: mol_type = other RNA
cgtaatcaggatgtaaactta

SEQ ID NO: 914 - RNA, 21 nt, synthetic construct
  modified_base 1: mod_base = gm
  modified_base 2: mod_base = OTHER; note = 2'-O-methyladenosine
  modified_base 3: mod_base = cm
  modified_base 4: mod_base = OTHER; note = 2'-O-methyladenosine
  modified_base 5: mod_base = cm
  modified_base 6: mod_base = OTHER; note = 2'-O-methyladenosine
  modified_base 7: mod_base = cm
  modified_base 8: mod_base = gm
  modified_base 9: mod_base = OTHER; note = 2'-fluorouridine
  modified_base 10: mod_base = OTHER; note = 2'-fluorocytidine
  modified_base 11: mod_base = OTHER; note = 2'-fluorocytidine
  modified_base 12: mod_base = OTHER; note = 2'-O-methyladenosine
  modified_base 13: mod_base = OTHER; note = 2'-O-methyladenosine
  modified_base 14: mod_base = cm
  modified_base 15: mod_base = um
  modified_base 16: mod_base = cm
  modified_base 17: mod_base = OTHER; note = 2'-O-methyladenosine
  modified_base 18: mod_base = gm
  modified_base 19: mod_base = um
  modified_base 20: mod_base = um
  modified_base 21: mod_base = um
  source 1..21: mol_type = other RNA
gacacacgtccaactcagttt

SEQ ID NO: 915 - RNA, 21 nt, synthetic construct
  modified_base 1: mod_base = gm
  modified_base 2: mod_base = gm
  modified_base 3: mod_base = OTHER; note = 2'-O-methyladenosine
  modified_base 4: mod_base = OTHER; note = 2'-O-methyladenosine
  modified_base 5: mod_base = gm
  modified_base 6: mod_base = OTHER; note = 2'-O-methyladenosine
  modified_base 7: mod_base = OTHER; note = 2'-O-methyladenosine
  modified_base 8: mod_base = gm
  modified_base 9: mod_base = OTHER; note = 2'-fluorouridine
  modified_base 10: mod_base = OTHER; note = 2'-fluoroadenosine
  modified_base 11: mod_base = OTHER; note = 2'-fluoroguanosine
  modified_base 12: mod_base = um
  modified_base 13: mod_base = gm
  modified_base 14: mod_base = gm
  modified_base 15: mod_base = OTHER; note = 2'-O-methyladenosine
  modified_base 16: mod_base = OTHER; note = 2'-O-methyladenosine
  modified_base 17: mod_base = OTHER; note = 2'-O-methyladenosine
  modified_base 18: mod_base = OTHER; note = 2'-O-methyladenosine
  modified_base 19: mod_base = um
  modified_base 20: mod_base = cm
  modified_base 21: mod_base = OTHER; note = 2'-O-methyladenosine
  source 1..21: mol_type = other RNA
ggaagaagtagtggaaaatca

SEQ ID NO: 916 - RNA, 21 nt, synthetic construct
  modified_base 1: mod_base = gm
  modified_base 2: mod_base = gm
  modified_base 3: mod_base = OTHER; note = 2'-O-methyladenosine
  modified_base 4: mod_base = OTHER; note = 2'-O-methyladenosine
  modified_base 5: mod_base = gm
  modified_base 6: mod_base = um
  modified_base 7: mod_base = OTHER; note = 2'-O-methyladenosine
  modified_base 8: mod_base = gm
  modified_base 9: mod_base = OTHER; note = 2'-fluorouridine
  modified_base 10: mod_base = OTHER; note = 2'-fluoroguanosine
  modified_base 11: mod_base = OTHER; note = 2'-fluoroguanosine
  modified_base 12: mod_base = OTHER; note = 2'-O-methyladenosine
  modified_base 13: mod_base = OTHER; note = 2'-O-methyladenosine
  modified_base 14: mod_base = OTHER; note = 2'-O-methyladenosine
  modified_base 15: mod_base = OTHER; note = 2'-O-methyladenosine
  modified_base 16: mod_base = um
  modified_base 17: mod_base = cm
  modified_base 18: mod_base = cm
  modified_base 19: mod_base = um
  modified_base 20: mod_base = OTHER; note = 2'-O-methyladenosine
  modified_base 21: mod_base = OTHER; note = 2'-O-methyladenosine
  source 1..21: mol_type = other RNA
ggaagtagtggaaaatcctaa

SEQ ID NO: 917 - RNA, 21 nt, synthetic construct
  modified_base 1: mod_base = gm
  modified_base 2: mod_base = um
  modified_base 3: mod_base = cm
  modified_base 4: mod_base = OTHER; note = 2'-O-methyladenosine
  modified_base 5: mod_base = um
  modified_base 6: mod_base = gm
  modified_base 7: mod_base = um
  modified_base 8: mod_base = gm
  modified_base 9: mod_base = OTHER; note = 2'-fluoroguanosine
  modified_base 10: mod_base = OTHER; note = 2'-fluorouridine
  modified_base 11: mod_base = OTHER; note = 2'-fluoroadenosine
  modified_base 12: mod_base = gm
  modified_base 13: mod_base = um
  modified_base 14: mod_base = gm
  modified_base 15: mod_base = um
  modified_base 16: mod_base = um
  modified_base 17: mod_base = OTHER; note = 2 -O-methylinosine
  modified_base 18: mod_base = gm
  modified_base 19: mod_base = um
  modified_base 20: mod_base = um
  modified_base 21: mod_base = um
  source 1..21: mol_type = other RNA
gtcatgtggtagtgttngttt

SEQ ID NO: 918 - RNA, 21 nt, synthetic construct
  modified_base 1: mod_base = cm
  modified_base 2: mod_base = OTHER; note = 2'-O-methyladenosine
  modified_base 3: mod_base = OTHER; note = 2'-O-methyladenosine
  modified_base 4: mod_base = gm
  modified_base 5: mod_base = cm
  modified_base 6: mod_base = um
  modified_base 7: mod_base = OTHER; note = 2'-O-methyladenosine
  modified_base 8: mod_base = um
  modified_base 9: mod_base = OTHER; note = 2'-fluoroguanosine
  modified_base 10: mod_base = OTHER; note = 2'-fluoroadenosine
  modified_base 11: mod_base = OTHER; note = 2'-fluorocytidine
  modified_base 12: mod_base = cm
  modified_base 13: mod_base = cm
  modified_base 14: mod_base = OTHER; note = 2'-O-methyladenosine
  modified_base 15: mod_base = OTHER; note = 2'-O-methyladenosine
  modified_base 16: mod_base = OTHER; note = 2'-O-methyladenosine
  modified_base 17: mod_base = um
  modified_base 18: mod_base = gm
  modified_base 19: mod_base = um
  modified_base 20: mod_base = OTHER; note = 2'-O-methyladenosine
  modified_base 21: mod_base = um
  source 1..21: mol_type = other RNA
caagctatgacccaaatgtat

SEQ ID NO: 919 - RNA, 21 nt, synthetic construct
  modified_base 1: mod_base = gm
  modified_base 2: mod_base = OTHER; note = 2'-O-methyladenosine
  modified_base 3: mod_base = cm
  modified_base 4: mod_base = OTHER; note = 2'-O-methyladenosine
  modified_base 5: mod_base = um
  modified_base 6: mod_base = gm
  modified_base 7: mod_base = gm
  modified_base 8: mod_base = um
  modified_base 9: mod_base = OTHER; note = 2'-fluoroadenosine
  modified_base 10: mod_base = OTHER; note = 2'-fluorocytidine
  modified_base 11: mod_base = OTHER; note = 2'-fluorocytidine
  modified_base 12: mod_base = OTHER; note = 2'-O-methyladenosine
  modified_base 13: mod_base = cm
  modified_base 14: mod_base = OTHER; note = 2'-O-methyladenosine
  modified_base 15: mod_base = um
  modified_base 16: mod_base = OTHER; note = 2'-O-methyladenosine
  modified_base 17: mod_base = um
  modified_base 18: mod_base = OTHER; note = 2'-O-methyladenosine
  modified_base 19: mod_base = um
  modified_base 20: mod_base = cm
  modified_base 21: mod_base = OTHER; note = 2'-O-methyladenosine
  source 1..21: mol_type = other RNA
gacatggtaccacatatatca

SEQ ID NO: 920 - RNA, 21 nt, synthetic construct
  modified_base 1: mod_base = gm
  modified_base 2: mod_base = cm
  modified_base 3: mod_base = OTHER; note = 2'-O-methyladenosine
  modified_base 4: mod_base = um
  modified_base 5: mod_base = gm
  modified_base 6: mod_base = gm
  modified_base 7: mod_base = um
  modified_base 8: mod_base = OTHER; note = 2'-O-methyladenosine
  modified_base 9: mod_base = OTHER; note = 2'-fluorocytidine
  modified_base 10: mod_base = OTHER; note = 2'-fluorocytidine
  modified_base 11: mod_base = OTHER; note = 2'-fluoroadenosine
  modified_base 12: mod_base = cm
  modified_base 13: mod_base = OTHER; note = 2'-O-methyladenosine
  modified_base 14: mod_base = um
  modified_base 15: mod_base = OTHER; note = 2'-O-methyladenosine
  modified_base 16: mod_base = um
  modified_base 17: mod_base = OTHER; note = 2'-O-methyladenosine
  modified_base 18: mod_base = um
  modified_base 19: mod_base = cm
  modified_base 20: mod_base = OTHER; note = 2'-O-methyladenosine
  modified_base 21: mod_base = OTHER; note = 2'-O-methyladenosine
  source 1..21: mol_type = other RNA
gcatggtaccacatatatcaa

SEQ ID NO: 921 - RNA, 21 nt, synthetic construct
  modified_base 1: mod_base = gm
  modified_base 2: mod_base = gm
  modified_base 3: mod_base = um
  modified_base 4: mod_base = OTHER; note = 2'-O-methyladenosine
  modified_base 5: mod_base = cm
  modified_base 6: mod_base = OTHER; note = 2'-O-methyladenosine
  modified_base 7: mod_base = um
  modified_base 8: mod_base = OTHER; note = 2'-O-methyladenosine
  modified_base 9: mod_base = OTHER; note = 2'-fluoroadenosine
  modified_base 10: mod_base = OTHER; note = 2'-fluorouridine
  modified_base 11: mod_base = OTHER; note = 2'-fluorocytidine
  modified_base 12: mod_base = OTHER; note = 2'-O-methyladenosine
  modified_base 13: mod_base = gm
  modified_base 14: mod_base = gm
  modified_base 15: mod_base = OTHER; note = 2'-O-methyladenosine
  modified_base 16: mod_base = um
  modified_base 17: mod_base = gm
  modified_base 18: mod_base = um
  modified_base 19: mod_base = OTHER; note = 2'-O-methyladenosine
  modified_base 20: mod_base = OTHER; note = 2'-O-methyladenosine
  modified_base 21: mod_base = OTHER; note = 2'-O-methyladenosine
  source 1..21: mol_type = other RNA
ggtacataatcaggatgtaaa

SEQ ID NO: 922 - RNA, 21 nt, synthetic construct
  modified_base 1: mod_base = gm
  modified_base 2: mod_base = cm
  modified_base 3: mod_base = OTHER; note = 2'-O-methyladenosine
  modified_base 4: mod_base = um
  modified_base 5: mod_base = OTHER; note = 2'-O-methyladenosine
  modified_base 6: mod_base = OTHER; note = 2'-O-methyladenosine
  modified_base 7: mod_base = um
  modified_base 8: mod_base = cm
  modified_base 9: mod_base = OTHER; note = 2'-fluoroadenosine
  modified_base 10: mod_base = OTHER; note = 2'-fluoroguanosine
  modified_base 11: mod_base = OTHER; note = 2'-fluoroguanosine
  modified_base 12: mod_base = OTHER; note = 2'-O-methyladenosine
  modified_base 13: mod_base = um
  modified_base 14: mod_base = gm
  modified_base 15: mod_base = um
  modified_base 16: mod_base = OTHER; note = 2'-O-methyladenosine
  modified_base 17: mod_base = OTHER; note = 2'-O-methyladenosine
  modified_base 18: mod_base = OTHER; note = 2'-O-methyladenosine
  modified_base 19: mod_base = cm
  modified_base 20: mod_base = um
  modified_base 21: mod_base = um
  source 1..21: mol_type = other RNA
gcataatcaggatgtaaactt

SEQ ID NO: 923 - RNA, 21 nt, synthetic construct
  modified_base 1: mod_base = cm
  modified_base 2: mod_base = OTHER; note = 2-aminoadenosine
  modified_base 3: mod_base = um
  modified_base 4: mod_base = OTHER; note = 2'-O-methyladenosine
  modified_base 5: mod_base = OTHER; note = 2'-O-methyladenosine
  modified_base 6: mod_base = um
  modified_base 7: mod_base = cm
  modified_base 8: mod_base = OTHER; note = 2'-O-methyladenosine
  modified_base 9: mod_base = OTHER; note = 2'-fluoroguanosine
  modified_base 10: mod_base = OTHER; note = 2'-fluoroguanosine
  modified_base 11: mod_base = OTHER; note = 2'-fluoroadenosine
  modified_base 12: mod_base = um
  modified_base 13: mod_base = gm
  modified_base 14: mod_base = um
  modified_base 15: mod_base = OTHER; note = 2'-O-methyladenosine
  modified_base 16: mod_base = OTHER; note = 2'-O-methyladenosine
  modified_base 17: mod_base = OTHER; note = 2'-O-methyladenosine
  modified_base 18: mod_base = cm
  modified_base 19: mod_base = um
  modified_base 20: mod_base = um
  modified_base 21: mod_base = OTHER; note = 2'-O-methyladenosine
  source 1..21: mol_type = other RNA
cataatcaggatgtaaactta

SEQ ID NO: 924 - RNA, 21 nt, synthetic construct
  modified_base 1: mod_base = gm
  modified_base 2: mod_base = gm
  modified_base 3: mod_base = OTHER; note = 2'-O-methyladenosine
  modified_base 4: mod_base = um
  modified_base 5: mod_base = gm
  modified_base 6: mod_base = um
  modified_base 7: mod_base = OTHER; note = 2'-O-methyladenosine
  modified_base 8: mod_base = OTHER; note = 2'-O-methyladenosine
  modified_base 9: mod_base = OTHER; note = 2'-fluoroadenosine
  modified_base 10: mod_base = OTHER; note = 2'-fluorocytidine
  modified_base 11: mod_base = OTHER; note = 2'-fluorouridine
  modified_base 12: mod_base = um
  modified_base 13: mod_base = OTHER; note = 2'-O-methyladenosine
  modified_base 14: mod_base = cm
  modified_base 15: mod_base = OTHER; note = 2'-O-methyladenosine
  modified_base 16: mod_base = um
  modified_base 17: mod_base = OTHER; note = 2'-O-methyladenosine
  modified_base 18: mod_base = gm
  modified_base 19: mod_base = cm
  modified_base 20: mod_base = um
  modified_base 21: mod_base = OTHER; note = 2'-O-methyladenosine
  source 1..21: mol_type = other RNA
ggatgtaaacttacatagcta

SEQ ID NO: 925 - RNA, 21 nt, synthetic construct
  modified_base 1: mod_base = gm
  modified_base 2: mod_base = gm
  modified_base 3: mod_base = um
  modified_base 4: mod_base = OTHER; note = 2'-O-methyladenosine
  modified_base 5: mod_base = OTHER; note = 2'-O-methyladenosine
  modified_base 6: mod_base = gm
  modified_base 7: mod_base = gm
  modified_base 8: mod_base = cm
  modified_base 9: mod_base = OTHER; note = 2'-fluorouridine
  modified_base 10: mod_base = OTHER; note = 2'-fluoroadenosine
  modified_base 11: mod_base = OTHER; note = 2'-fluoroguanosine
  modified_base 12: mod_base = OTHER; note = 2'-O-methyladenosine
  modified_base 13: mod_base = cm
  modified_base 14: mod_base = um
  modified_base 15: mod_base = um
  modified_base 16: mod_base = um
  modified_base 17: mod_base = OTHER; note = 2'-O-methyladenosine
  modified_base 18: mod_base = um
  modified_base 19: mod_base = um
  modified_base 20: mod_base = OTHER; note = 2-aminoadenosine
  modified_base 21: mod_base = um
  source 1..21: mol_type = other RNA
ggtaaggctagactttattat

SEQ ID NO: 926 - RNA, 21 nt, synthetic construct
  modified_base 1: mod_base = um
  modified_base 2: mod_base = gm
  modified_base 3: mod_base = gm
  modified_base 4: mod_base = um
  modified_base 5: mod_base = gm
  modified_base 6: mod_base = um
  modified_base 7: mod_base = cm
  modified_base 8: mod_base = um
  modified_base 9: mod_base = OTHER; note = 2'-fluorocytidine
  modified_base 10: mod_base = OTHER; note = 2'-fluorouridine
  modified_base 11: mod_base = OTHER; note = 2'-fluoroadenosine
  modified_base 12: mod_base = um
  modified_base 13: mod_base = cm
  modified_base 14: mod_base = um
  modified_base 15: mod_base = gm
  modified_base 16: mod_base = um
  modified_base 17: mod_base = OTHER; note = 2'-O-methyladenosine
  modified_base 18: mod_base = gm
  modified_base 19: mod_base = um
  modified_base 20: mod_base = OTHER; note = 2'-O-methyladenosine
  modified_base 21: mod_base = OTHER; note = 2'-O-methyladenosine
  source 1..21: mol_type = other RNA
tggtgtctctatctgtagtaa

SEQ ID NO: 927 - RNA, 21 nt, synthetic construct
  modified_base 1: mod_base = gm
  modified_base 2: mod_base = um
  modified_base 3: mod_base = cm
  modified_base 4: mod_base = um
  modified_base 5: mod_base = cm
  modified_base 6: mod_base = um
  modified_base 7: mod_base = OTHER; note = 2'-O-methyladenosine
  modified_base 8: mod_base = um
  modified_base 9: mod_base = OTHER; note = 2'-fluorocytidine
  modified_base 10: mod_base = OTHER; note = 2'-fluorouridine
  modified_base 11: mod_base = OTHER; note = 2'-fluoroguanosine
  modified_base 12: mod_base = um
  modified_base 13: mod_base = OTHER; note = 2'-O-methyladenosine
  modified_base 14: mod_base = gm
  modified_base 15: mod_base = um
  modified_base 16: mod_base = OTHER; note = 2'-O-methyladenosine
  modified_base 17: mod_base = cm
  modified_base 18: mod_base = um
  modified_base 19: mod_base = OTHER; note = 2'-O-methyladenosine
  modified_base 20: mod_base = um
  modified_base 21: mod_base = OTHER; note = 2'-O-methyladenosine
  source 1..21: mol_type = other RNA
gtctctatctgtagtactata

SEQ ID NO: 928 - RNA, 21 nt, synthetic construct
  modified_base 1: mod_base = gm
  modified_base 2: mod_base = cm
  modified_base 3: mod_base = um
  modified_base 4: mod_base = cm
  modified_base 5: mod_base = um
  modified_base 6: mod_base = OTHER; note = 2'-O-methyladenosine
  modified_base 7: mod_base = um
  modified_base 8: mod_base = cm
  modified_base 9: mod_base = OTHER; note = 2'-fluorouridine
  modified_base 10: mod_base = OTHER; note = 2'-fluoroguanosine
  modified_base 11: mod_base = OTHER; note = 2'-fluorouridine
  modified_base 12: mod_base = OTHER; note = 2'-O-methyladenosine
  modified_base 13: mod_base = gm
  modified_base 14: mod_base = um
  modified_base 15: mod_base = OTHER; note = 2'-O-methyladenosine
  modified_base 16: mod_base = cm
  modified_base 17: mod_base = um
  modified_base 18: mod_base = OTHER; note = 2'-O-methyladenosine
  modified_base 19: mod_base = um
  modified_base 20: mod_base = gm
  modified_base 21: mod_base = OTHER; note = 2'-O-methyladenosine
  source 1..21: mol_type = other RNA
gctctatctgtagtactatga

SEQ ID NO: 929 - RNA, 21 nt, synthetic construct
  modified_base 1: mod_base = gm
  modified_base 2: mod_base = cm
  modified_base 3: mod_base = um
  modified_base 4: mod_base = OTHER; note = 2'-O-methyladenosine
  modified_base 5: mod_base = um
  modified_base 6: mod_base = cm
  modified_base 7: mod_base = um
  modified_base 8: mod_base = gm
  modified_base 9: mod_base = OTHER; note = 2'-fluorouridine
  modified_base 10: mod_base = OTHER; note = 2'-fluoroadenosine
  modified_base 11: mod_base = OTHER; note = 2'-fluoroguanosine
  modified_base 12: mod_base = um
  modified_base 13: mod_base = OTHER; note = 2'-O-methyladenosine
  modified_base 14: mod_base = cm
  modified_base 15: mod_base = um
  modified_base 16: mod_base = OTHER; note = 2'-O-methyladenosine
  modified_base 17: mod_base = um
  modified_base 18: mod_base = gm
  modified_base 19: mod_base = OTHER; note = 2'-O-methyladenosine
  modified_base 20: mod_base = cm
  modified_base 21: mod_base = OTHER; note = 2'-O-methyladenosine
  source 1..21: mol_type = other RNA
gctatctgtagtactatgaca

SEQ ID NO: 930 - RNA, 21 nt, synthetic construct
  modified_base 1: mod_base = gm
  modified_base 2: mod_base = um
  modified_base 3: mod_base = cm
  modified_base 4: mod_base = um
  modified_base 5: mod_base = OTHER; note = 2'-O-methyladenosine
  modified_base 6: mod_base = gm
  modified_base 7: mod_base = cm
  modified_base 8: mod_base = OTHER; note = 2'-O-methyladenosine
  modified_base 9: mod_base = OTHER; note = 2'-fluoroadenosine
  modified_base 10: mod_base = OTHER; note = 2'-fluorouridine
  modified_base 11: mod_base = OTHER; note = 2'-fluoroguanosine
  modified_base 12: mod_base = um
  modified_base 13: mod_base = um
  modified_base 14: mod_base = gm
  modified_base 15: mod_base = cm
  modified_base 16: mod_base = OTHER; note = 2'-O-methyladenosine
  modified_base 17: mod_base = OTHER; note = 2'-O-methyladenosine
  modified_base 18: mod_base = OTHER; note = 2-aminoadenosine
  modified_base 19: mod_base = um
  modified_base 20: mod_base = um
  modified_base 21: mod_base = OTHER; note = 2'-O-methyladenosine
  source 1..21: mol_type = other RNA
gtctagcaatgttgcaaatta

SEQ ID NO: 931 - RNA, 21 nt, synthetic construct
  modified_base 1: mod_base = gm
  modified_base 2: mod_base = OTHER; note = 2-aminoadenosine
  modified_base 3: mod_base = OTHER; note = 2'-O-methyladenosine
  modified_base 4: mod_base = gm
  modified_base 5: mod_base = OTHER; note = 2'-O-methyladenosine
  modified_base 6: mod_base = cm
  modified_base 7: mod_base = um
  modified_base 8: mod_base = cm
  modified_base 9: mod_base = OTHER; note = 2'-fluoroadenosine
  modified_base 10: mod_base = OTHER; note = 2'-fluorouridine
  modified_base 11: mod_base = OTHER; note = 2'-fluorocytidine
  modified_base 12: mod_base = um
  modified_base 13: mod_base = cm
  modified_base 14: mod_base = um
  modified_base 15: mod_base = OTHER; note = 2'-O-methyladenosine
  modified_base 16: mod_base = um
  modified_base 17: mod_base = gm
  modified_base 18: mod_base = OTHER; note = 2'-O-methyladenosine
  modified_base 19: mod_base = um
  modified_base 20: mod_base = gm
  modified_base 21: mod_base = OTHER; note = 2'-O-methyladenosine
  source 1..21: mol_type = other RNA
gaagactcatctctatgatga

SEQ ID NO: 932 - RNA, 21 nt, synthetic construct
  modified_base 1: mod_base = gm
  modified_base 2: mod_base = um
  modified_base 3: mod_base = gm
  modified_base 4: mod_base = gm
  modified_base 5: mod_base = OTHER; note = 2'-O-methyladenosine
  modified_base 6: mod_base = gm
  modified_base 7: mod_base = um
  modified_base 8: mod_base = cm
  modified_base 9: mod_base = OTHER; note = 2'-fluoroadenosine
  modified_base 10: mod_base = OTHER; note = 2'-fluorocytidine
  modified_base 11: mod_base = OTHER; note = 2'-fluoroadenosine
  modified_base 12: mod_base = um
  modified_base 13: mod_base = um
  modified_base 14: mod_base = OTHER; note = 2'-O-methyladenosine
  modified_base 15: mod_base = OTHER; note = 2'-O-methyladenosine
  modified_base 16: mod_base = um
  modified_base 17: mod_base = um
  modified_base 18: mod_base = gm
  modified_base 19: mod_base = gm
  modified_base 20: mod_base = OTHER; note = 2'-O-methyladenosine
  modified_base 21: mod_base = OTHER; note = 2'-O-methyladenosine
  source 1..21: mol_type = other RNA
gtggagtcacattaattggaa

SEQ ID NO: 933 - RNA, 21 nt, synthetic construct
  modified_base 1: mod_base = gm
  modified_base 2: mod_base = gm
  modified_base 3: mod_base = OTHER; note = 2'-O-methyladenosine
  modified_base 4: mod_base = um
  modified_base 5: mod_base = gm
  modified_base 6: mod_base = OTHER; note = 2'-O-methyladenosine
  modified_base 7: mod_base = gm
  modified_base 8: mod_base = um
  modified_base 9: mod_base = OTHER; note = 2'-fluoroadenosine
  modified_base 10: mod_base = OTHER; note = 2'-fluorocytidine
  modified_base 11: mod_base = OTHER; note = 2'-fluoroguanosine
  modified_base 12: mod_base = OTHER; note = 2'-O-methyladenosine
  modified_base 13: mod_base = OTHER; note = 2'-O-methyladenosine
  modified_base 14: mod_base = cm
  modified_base 15: mod_base = um
  modified_base 16: mod_base = um
  modified_base 17: mod_base = OTHER; note = 2'-O-methyladenosine
  modified_base 18: mod_base = um
  modified_base 19: mod_base = gm
  modified_base 20: mod_base = um
  modified_base 21: mod_base = OTHER; note = 2'-O-methyladenosine
  source 1..21: mol_type = other RNA
ggatgagtacgaacttatgta

SEQ ID NO: 934 - RNA, 21 nt, synthetic construct
  modified_base 1: mod_base = OTHER; note = 2'-O-methyladenosine
  modified_base 2: mod_base = cm
  modified_base 3: mod_base = gm
  modified_base 4: mod_base = OTHER; note = 2'-O-methyladenosine
  modified_base 5: mod_base = OTHER; note = 2'-O-methyladenosine
  modified_base 6: mod_base = cm
  modified_base 7: mod_base = um
  modified_base 8: mod_base = um
  modified_base 9: mod_base = OTHER; note = 2'-fluoroadenosine
  modified_base 10: mod_base = OTHER; note = 2'-fluorouridine
  modified_base 11: mod_base = OTHER; note = 2'-fluoroguanosine
  modified_base 12: mod_base = um
  modified_base 13: mod_base = OTHER; note = 2'-O-methyladenosine
  modified_base 14: mod_base = cm
  modified_base 15: mod_base = um
  modified_base 16: mod_base = cm
  modified_base 17: mod_base = OTHER; note = 2'-O-methyladenosine
  modified_base 18: mod_base = um
  modified_base 19: mod_base = um
  modified_base 20: mod_base = cm
  modified_base 21: mod_base = OTHER; note = 2'-O-methyladenosine
  source 1..21: mol_type = other RNA
acgaacttatgtactcattca

SEQ ID NO: 935 - RNA, 21 nt, synthetic construct
  modified_base 1: mod_base = cm
  modified_base 2: mod_base = gm
  modified_base 3: mod_base = OTHER; note = 2'-O-methyladenosine
  modified_base 4: mod_base = OTHER; note = 2'-O-methyladenosine
  modified_base 5: mod_base = cm
  modified_base 6: mod_base = um
  modified_base 7: mod_base = um
  modified_base 8: mod_base = OTHER; note = 2'-O-methyladenosine
  modified_base 9: mod_base = OTHER; note = 2'-fluorouridine
  modified_base 10: mod_base = OTHER; note = 2'-fluoroguanosine
  modified_base 11: mod_base = OTHER; note = 2'-fluorouridine
  modified_base 12: mod_base = OTHER; note = 2'-O-methyladenosine
  modified_base 13: mod_base = cm
  modified_base 14: mod_base = um
  modified_base 15: mod_base = cm
  modified_base 16: mod_base = OTHER; note = 2'-O-methyladenosine
  modified_base 17: mod_base = um
  modified_base 18: mod_base = um
  modified_base 19: mod_base = cm
  modified_base 20: mod_base = gm
  modified_base 21: mod_base = um
  source 1..21: mol_type = other RNA
cgaacttatgtactcattcgt

SEQ ID NO: 936 - RNA, 21 nt, synthetic construct
  modified_base 1: mod_base = cm
  modified_base 2: mod_base = um
  modified_base 3: mod_base = um
  modified_base 4: mod_base = OTHER; note = 2'-O-methyladenosine
  modified_base 5: mod_base = um
  modified_base 6: mod_base = gm
  modified_base 7: mod_base = um
  modified_base 8: mod_base = OTHER; note = 2'-O-methyladenosine
  modified_base 9: mod_base = OTHER; note = 2'-fluorocytidine
  modified_base 10: mod_base = OTHER; note = 2'-fluorouridine
  modified_base 11: mod_base = OTHER; note = 2'-fluorocytidine
  modified_base 12: mod_base = OTHER; note = 2'-O-methyladenosine
  modified_base 13: mod_base = um
  modified_base 14: mod_base = um
  modified_base 15: mod_base = cm
  modified_base 16: mod_base = gm
  modified_base 17: mod_base = um
  modified_base 18: mod_base = um
  modified_base 19: mod_base = um
  modified_base 20: mod_base = cm
  modified_base 21: mod_base = OTHER; note = 2'-O-methyladenosine
  source 1..21: mol_type = other RNA
cttatgtactcattcgtttca

SEQ ID NO: 937 - RNA, 21 nt, synthetic construct
  modified_base 1: mod_base = cm
  modified_base 2: mod_base = um
  modified_base 3: mod_base = um
  modified_base 4: mod_base = OTHER; note = 2'-O-methyladenosine
  modified_base 5: mod_base = um
  modified_base 6: mod_base = gm
  modified_base 7: mod_base = um
  modified_base 8: mod_base = OTHER; note = 2'-O-methyladenosine
  modified_base 9: mod_base = OTHER; note = 2'-fluorocytidine
  modified_base 10: mod_base = OTHER; note = 2'-fluorouridine
  modified_base 11: mod_base = OTHER; note = 2'-fluorocytidine
  modified_base 12: mod_base = OTHER; note = 2'-O-methyladenosine
  modified_base 13: mod_base = um
  modified_base 14: mod_base = um
  modified_base 15: mod_base = cm
  modified_base 16: mod_base = OTHER; note = 2 -O-methylinosine
  modified_base 17: mod_base = um
  modified_base 18: mod_base = um
  modified_base 19: mod_base = um
  modified_base 20: mod_base = cm
  modified_base 21: mod_base = OTHER; note = 2'-O-methyladenosine
  source 1..21: mol_type = other RNA
cttatgtactcattcntttca

SEQ ID NO: 938 - RNA, 21 nt, synthetic construct
  modified_base 1: mod_base = gm
  modified_base 2: mod_base = um
  modified_base 3: mod_base = OTHER; note = 2'-O-methyladenosine
  modified_base 4: mod_base = gm
  modified_base 5: mod_base = um
  modified_base 6: mod_base = um
  modified_base 7: mod_base = OTHER; note = 2'-O-methyladenosine
  modified_base 8: mod_base = OTHER; note = 2'-O-methyladenosine
  modified_base 9: mod_base = OTHER; note = 2'-fluorouridine
  modified_base 10: mod_base = OTHER; note = 2'-fluoroadenosine
  modified_base 11: mod_base = OTHER; note = 2'-fluoroguanosine
  modified_base 12: mod_base = cm
  modified_base 13: mod_base = gm
  modified_base 14: mod_base = um
  modified_base 15: mod_base = OTHER; note = 2'-O-methyladenosine
  modified_base 16: mod_base = cm
  modified_base 17: mod_base = um
  modified_base 18: mod_base = um
  modified_base 19: mod_base = cm
  modified_base 20: mod_base = um
  modified_base 21: mod_base = um
  source 1..21: mol_type = other RNA
gtagttaatagcgtacttctt

SEQ ID NO: 939 - RNA, 21 nt, synthetic construct
  modified_base 1: mod_base = gm
  modified_base 2: mod_base = cm
  modified_base 3: mod_base = um
  modified_base 4: mod_base = um
  modified_base 5: mod_base = gm
  modified_base 6: mod_base = cm
  modified_base 7: mod_base = um
  modified_base 8: mod_base = um
  modified_base 9: mod_base = OTHER; note = 2'-fluorouridine
  modified_base 10: mod_base = OTHER; note = 2'-fluorocytidine
  modified_base 11: mod_base = OTHER; note = 2'-fluoroguanosine
  modified_base 12: mod_base = um
  modified_base 13: mod_base = gm
  modified_base 14: mod_base = gm
  modified_base 15: mod_base = um
  modified_base 16: mod_base = OTHER; note = 2'-O-methyladenosine
  modified_base 17: mod_base = um
  modified_base 18: mod_base = um
  modified_base 19: mod_base = cm
  modified_base 20: mod_base = um
  modified_base 21: mod_base = um
  source 1..21: mol_type = other RNA
gcttgctttcgtggtattctt

SEQ ID NO: 940 - RNA, 21 nt, synthetic construct
  modified_base 1: mod_base = gm
  modified_base 2: mod_base = um
  modified_base 3: mod_base = OTHER; note = 2'-O-methyladenosine
  modified_base 4: mod_base = cm
  modified_base 5: mod_base = OTHER; note = 2'-O-methyladenosine
  modified_base 6: mod_base = cm
  modified_base 7: mod_base = um
  modified_base 8: mod_base = OTHER; note = 2'-O-methyladenosine
  modified_base 9: mod_base = OTHER; note = 2'-fluoroguanosine
  modified_base 10: mod_base = OTHER; note = 2'-fluorocytidine
  modified_base 11: mod_base = OTHER; note = 2'-fluorocytidine
  modified_base 12: mod_base = OTHER; note = 2'-O-methyladenosine
  modified_base 13: mod_base = um
  modified_base 14: mod_base = cm
  modified_base 15: mod_base = cm
  modified_base 16: mod_base = um
  modified_base 17: mod_base = um
  modified_base 18: mod_base = OTHER; note = 2'-O-methyladenosine
  modified_base 19: mod_base = cm
  modified_base 20: mod_base = um
  modified_base 21: mod_base = OTHER; note = 2'-O-methyladenosine
  source 1..21: mol_type = other RNA
gtacactagccatccttacta

SEQ ID NO: 941 - RNA, 21 nt, synthetic construct
  modified_base 1: mod_base = gm
  modified_base 2: mod_base = um
  modified_base 3: mod_base = OTHER; note = 2'-O-methyladenosine
  modified_base 4: mod_base = cm
  modified_base 5: mod_base = um
  modified_base 6: mod_base = gm
  modified_base 7: mod_base = cm
  modified_base 8: mod_base = um
  modified_base 9: mod_base = OTHER; note = 2'-fluoroguanosine
  modified_base 10: mod_base = OTHER; note = 2'-fluorocytidine
  modified_base 11: mod_base = OTHER; note = 2'-fluoroadenosine
  modified_base 12: mod_base = OTHER; note = 2'-O-methyladenosine
  modified_base 13: mod_base = um
  modified_base 14: mod_base = OTHER; note = 2'-O-methyladenosine
  modified_base 15: mod_base = um
  modified_base 16: mod_base = um
  modified_base 17: mod_base = gm
  modified_base 18: mod_base = um
  modified_base 19: mod_base = um
  modified_base 20: mod_base = OTHER; note = 2'-O-methyladenosine
  modified_base 21: mod_base = OTHER; note = 2'-O-methyladenosine
  source 1..21: mol_type = other RNA
gtactgctgcaatattgttaa

SEQ ID NO: 942 - RNA, 21 nt, synthetic construct
  modified_base 1: mod_base = cm
  modified_base 2: mod_base = um
  modified_base 3: mod_base = gm
  modified_base 4: mod_base = cm
  modified_base 5: mod_base = um
  modified_base 6: mod_base = gm
  modified_base 7: mod_base = cm
  modified_base 8: mod_base = OTHER; note = 2'-O-methyladenosine
  modified_base 9: mod_base = OTHER; note = 2'-fluoroadenosine
  modified_base 10: mod_base = OTHER; note = 2'-fluorouridine
  modified_base 11: mod_base = OTHER; note = 2'-fluoroadenosine
  modified_base 12: mod_base = um
  modified_base 13: mod_base = um
  modified_base 14: mod_base = gm
  modified_base 15: mod_base = um
  modified_base 16: mod_base = um
  modified_base 17: mod_base = OTHER; note = 2'-O-methyladenosine
  modified_base 18: mod_base = OTHER; note = 2'-O-methyladenosine
  modified_base 19: mod_base = cm
  modified_base 20: mod_base = gm
  modified_base 21: mod_base = um
  source 1..21: mol_type = other RNA
ctgctgcaatattgttaacgt

SEQ ID NO: 943 - RNA, 21 nt, synthetic construct
  modified_base 1: mod_base = um
  modified_base 2: mod_base = gm
  modified_base 3: mod_base = cm
  modified_base 4: mod_base = um
  modified_base 5: mod_base = gm
  modified_base 6: mod_base = cm
  modified_base 7: mod_base = OTHER; note = 2'-O-methyladenosine
  modified_base 8: mod_base = OTHER; note = 2'-O-methyladenosine
  modified_base 9: mod_base = OTHER; note = 2'-fluorouridine
  modified_base 10: mod_base = OTHER; note = 2'-fluoroadenosine
  modified_base 11: mod_base = OTHER; note = 2'-fluorouridine
  modified_base 12: mod_base = um
  modified_base 13: mod_base = gm
  modified_base 14: mod_base = um
  modified_base 15: mod_base = um
  modified_base 16: mod_base = OTHER; note = 2'-O-methyladenosine
  modified_base 17: mod_base = OTHER; note = 2'-O-methyladenosine
  modified_base 18: mod_base = cm
  modified_base 19: mod_base = gm
  modified_base 20: mod_base = um
  modified_base 21: mod_base = OTHER; note = 2'-O-methyladenosine
  source 1..21: mol_type = other RNA
tgctgcaatattgttaacgta

SEQ ID NO: 944 - RNA, 21 nt, synthetic construct
  modified_base 1: mod_base = um
  modified_base 2: mod_base = gm
  modified_base 3: mod_base = cm
  modified_base 4: mod_base = um
  modified_base 5: mod_base = gm
  modified_base 6: mod_base = cm
  modified_base 7: mod_base = OTHER; note = 2'-O-methyladenosine
  modified_base 8: mod_base = OTHER; note = 2'-O-methyladenosine
  modified_base 9: mod_base = OTHER; note = 2'-fluorouridine
  modified_base 10: mod_base = OTHER; note = 2-aminoadenosine
  modified_base 11: mod_base = OTHER; note = 2'-fluorouridine
  modified_base 12: mod_base = um
  modified_base 13: mod_base = gm
  modified_base 14: mod_base = um
  modified_base 15: mod_base = um
  modified_base 16: mod_base = OTHER; note = 2'-O-methyladenosine
  modified_base 17: mod_base = OTHER; note = 2'-O-methyladenosine
  modified_base 18: mod_base = cm
  modified_base 19: mod_base = gm
  modified_base 20: mod_base = um
  modified_base 21: mod_base = OTHER; note = 2'-O-methyladenosine
  source 1..21: mol_type = other RNA
tgctgcaatattgttaacgta

SEQ ID NO: 945 - RNA, 21 nt, synthetic construct
  modified_base 1: mod_base = cm
  modified_base 2: mod_base = cm
  modified_base 3: mod_base = um
  modified_base 4: mod_base = gm
  modified_base 5: mod_base = OTHER; note = 2'-O-methyladenosine
  modified_base 6: mod_base = um
  modified_base 7: mod_base = cm
  modified_base 8: mod_base = um
  modified_base 9: mod_base = OTHER; note = 2'-fluorouridine
  modified_base 10: mod_base = OTHER; note = 2'-fluorocytidine
  modified_base 11: mod_base = OTHER; note = 2'-fluorouridine
  modified_base 12: mod_base = gm
  modified_base 13: mod_base = gm
  modified_base 14: mod_base = um
  modified_base 15: mod_base = cm
  modified_base 16: mod_base = um
  modified_base 17: mod_base = OTHER; note = 2'-O-methyladenosine
  modified_base 18: mod_base = OTHER; note = 2'-O-methyladenosine
  modified_base 19: mod_base = OTHER; note = 2'-O-methyladenosine
  modified_base 20: mod_base = cm
  modified_base 21: mod_base = OTHER; note = 2'-O-methyladenosine
  source 1..21: mol_type = other RNA
cctgatcttctggtctaaaca

SEQ ID NO: 946 - RNA, 21 nt, synthetic construct
  modified_base 1: mod_base = cm
  modified_base 2: mod_base = OTHER; note = 2'-O-methyladenosine
  modified_base 3: mod_base = um
  modified_base 4: mod_base = cm
  modified_base 5: mod_base = OTHER; note = 2'-O-methyladenosine
  modified_base 6: mod_base = cm
  modified_base 7: mod_base = gm
  modified_base 8: mod_base = OTHER; note = 2'-O-methyladenosine
  modified_base 9: mod_base = OTHER; note = 2'-fluoroadenosine
  modified_base 10: mod_base = OTHER; note = 2'-fluorocytidine
  modified_base 11: mod_base = OTHER; note = 2'-fluoroguanosine
  modified_base 12: mod_base = cm
  modified_base 13: mod_base = um
  modified_base 14: mod_base = um
  modified_base 15: mod_base = um
  modified_base 16: mod_base = cm
  modified_base 17: mod_base = um
  modified_base 18: mod_base = um
  modified_base 19: mod_base = OTHER; note = 2'-O-methyladenosine
  modified_base 20: mod_base = um
  modified_base 21: mod_base = um
  source 1..21: mol_type = other RNA
catcacgaacgctttcttatt

SEQ ID NO: 947 - RNA, 21 nt, synthetic construct
  modified_base 1: mod_base = cm
  modified_base 2: mod_base = OTHER; note = 2'-O-methyladenosine
  modified_base 3: mod_base = um
  modified_base 4: mod_base = cm
  modified_base 5: mod_base = OTHER; note = 2'-O-methyladenosine
  modified_base 6: mod_base = cm
  modified_base 7: mod_base = gm
  modified_base 8: mod_base = OTHER; note = 2'-O-methyladenosine
  modified_base 9: mod_base = OTHER; note = 2'-fluoroadenosine
  modified_base 10: mod_base = OTHER; note = 2'-fluorocytidine
  modified_base 11: mod_base = OTHER; note = 2'-fluoroguanosine
  modified_base 12: mod_base = cm
  modified_base 13: mod_base = um
  modified_base 14: mod_base = um
  modified_base 15: mod_base = um
  modified_base 16: mod_base = cm
  modified_base 17: mod_base = um
  modified_base 18: mod_base = um
  modified_base 19: mod_base = OTHER; note = 2-aminoadenosine
  modified_base 20: mod_base = um
  modified_base 21: mod_base = um
  source 1..21: mol_type = other RNA
catcacgaacgctttcttatt

SEQ ID NO: 948 - RNA, 21 nt, synthetic construct
  modified_base 1: mod_base = cm
  modified_base 2: mod_base = gm
  modified_base 3: mod_base = OTHER; note = 2'-O-methyladenosine
  modified_base 4: mod_base = OTHER; note = 2'-O-methyladenosine
  modified_base 5: mod_base = cm
  modified_base 6: mod_base = gm
  modified_base 7: mod_base = cm
  modified_base 8: mod_base = um
  modified_base 9: mod_base = OTHER; note = 2'-fluorouridine
  modified_base 10: mod_base = OTHER; note = 2'-fluorouridine
  modified_base 11: mod_base = OTHER; note = 2'-fluorocytidine
  modified_base 12: mod_base = um
  modified_base 13: mod_base = um
  modified_base 14: mod_base = OTHER; note = 2'-O-methyladenosine
  modified_base 15: mod_base = um
  modified_base 16: mod_base = um
  modified_base 17: mod_base = OTHER; note = 2'-O-methyladenosine
  modified_base 18: mod_base = cm
  modified_base 19: mod_base = OTHER; note = 2'-O-methyladenosine
  modified_base 20: mod_base = OTHER; note = 2'-O-methyladenosine
  modified_base 21: mod_base = OTHER; note = 2'-O-methyladenosine
  source 1..21: mol_type = other RNA
cgaacgctttcttattacaaa

SEQ ID NO: 949 - RNA, 21 nt, synthetic construct
  modified_base 1: mod_base = gm
  modified_base 2: mod_base = OTHER; note = 2'-O-methyladenosine
  modified_base 3: mod_base = cm
  modified_base 4: mod_base = OTHER; note = 2'-O-methyladenosine
  modified_base 5: mod_base = gm
  modified_base 6: mod_base = um
  modified_base 7: mod_base = OTHER; note = 2'-O-methyladenosine
  modified_base 8: mod_base = OTHER; note = 2'-O-methyladenosine
  modified_base 9: mod_base = OTHER; note = 2'-fluoroguanosine
  modified_base 10: mod_base = OTHER; note = 2'-fluorouridine
  modified_base 11: mod_base = OTHER; note = 2'-fluoroguanosine
  modified_base 12: mod_base = OTHER; note = 2'-O-methyladenosine
  modified_base 13: mod_base = cm
  modified_base 14: mod_base = OTHER; note = 2'-O-methyladenosine
  modified_base 15: mod_base = OTHER; note = 2'-O-methyladenosine
  modified_base 16: mod_base = cm
  modified_base 17: mod_base = OTHER; note = 2'-O-methyladenosine
  modified_base 18: mod_base = gm
  modified_base 19: mod_base = OTHER; note = 2'-O-methyladenosine
  modified_base 20: mod_base = um
  modified_base 21: mod_base = OTHER; note = 2'-O-methyladenosine
  source 1..21: mol_type = other RNA
gacagtaagtgacaacagata

SEQ ID NO: 950 - RNA, 21 nt, synthetic construct
  modified_base 1: mod_base = cm
  modified_base 2: mod_base = OTHER; note = 2'-O-methyladenosine
  modified_base 3: mod_base = gm
  modified_base 4: mod_base = um
  modified_base 5: mod_base = OTHER; note = 2'-O-methyladenosine
  modified_base 6: mod_base = OTHER; note = 2'-O-methyladenosine
  modified_base 7: mod_base = gm
  modified_base 8: mod_base = um
  modified_base 9: mod_base = OTHER; note = 2'-fluoroguanosine
  modified_base 10: mod_base = OTHER; note = 2'-fluoroadenosine
  modified_base 11: mod_base = OTHER; note = 2'-fluorocytidine
  modified_base 12: mod_base = OTHER; note = 2'-O-methyladenosine
  modified_base 13: mod_base = OTHER; note = 2'-O-methyladenosine
  modified_base 14: mod_base = cm
  modified_base 15: mod_base = OTHER; note = 2'-O-methyladenosine
  modified_base 16: mod_base = gm
  modified_base 17: mod_base = OTHER; note = 2'-O-methyladenosine
  modified_base 18: mod_base = um
  modified_base 19: mod_base = gm
  modified_base 20: mod_base = um
  modified_base 21: mod_base = um
  source 1..21: mol_type = other RNA
cagtaagtgacaacagatgtt

SEQ ID NO: 951 - RNA, 21 nt, synthetic construct
  modified_base 1: mod_base = cm
  modified_base 2: mod_base = OTHER; note = 2-aminoadenosine
  modified_base 3: mod_base = OTHER; note = 2'-O-methyladenosine
  modified_base 4: mod_base = OTHER; note = 2'-O-methyladenosine
  modified_base 5: mod_base = um
  modified_base 6: mod_base = um
  modified_base 7: mod_base = gm
  modified_base 8: mod_base = gm
  modified_base 9: mod_base = OTHER; note = 2'-fluoroadenosine
  modified_base 10: mod_base = OTHER; note = 2'-fluorouridine
  modified_base 11: mod_base = OTHER; note = 2'-fluoroguanosine
  modified_base 12: mod_base = OTHER; note = 2'-O-methyladenosine
  modified_base 13: mod_base = cm
  modified_base 14: mod_base = OTHER; note = 2'-O-methyladenosine
  modified_base 15: mod_base = OTHER; note = 2'-O-methyladenosine
  modified_base 16: mod_base = OTHER; note = 2'-O-methyladenosine
  modified_base 17: mod_base = gm
  modified_base 18: mod_base = OTHER; note = 2'-O-methyladenosine
  modified_base 19: mod_base = um
  modified_base 20: mod_base = cm
  modified_base 21: mod_base = OTHER; note = 2'-O-methyladenosine
  source 1..21: mol_type = other RNA
caaattggatgacaaagatca

SEQ ID NO: 952 - RNA, 21 nt, synthetic construct
  modified_base 1: mod_base = cm
  modified_base 2: mod_base = um
  modified_base 3: mod_base = cm
  modified_base 4: mod_base = OTHER; note = 2'-O-methyladenosine
  modified_base 5: mod_base = cm
  modified_base 6: mod_base = OTHER; note = 2'-O-methyladenosine
  modified_base 7: mod_base = um
  modified_base 8: mod_base = OTHER; note = 2'-O-methyladenosine
  modified_base 9: mod_base = OTHER; note = 2'-fluoroguanosine
  modified_base 10: mod_base = OTHER; note = 2'-fluorocytidine
  modified_base 11: mod_base = OTHER; note = 2'-fluoroadenosine
  modified_base 12: mod_base = OTHER; note = 2'-O-methyladenosine
  modified_base 13: mod_base = um
  modified_base 14: mod_base = cm
  modified_base 15: mod_base = um
  modified_base 16: mod_base = um
  modified_base 17: mod_base = um
  modified_base 18: mod_base = OTHER; note = 2'-O-methyladenosine
  modified_base 19: mod_base = OTHER; note = 2-aminoadenosine
  modified_base 20: mod_base = um
  modified_base 21: mod_base = OTHER; note = 2'-O-methyladenosine
  source 1..21: mol_type = other RNA
ctcacatagcaatctttaata

SEQ ID NO: 953 - RNA, 21 nt, synthetic construct
  modified_base 1: mod_base = cm
  modified_base 2: mod_base = cm
  modified_base 3: mod_base = um
  modified_base 4: mod_base = um
  modified_base 5: mod_base = um
  modified_base 6: mod_base = um
  modified_base 7: mod_base = gm
  modified_base 8: mod_base = OTHER; note = 2'-O-methyladenosine
  modified_base 9: mod_base = OTHER; note = 2'-fluorouridine
  modified_base 10: mod_base = OTHER; note = 2'-fluoroguanosine
  modified_base 11: mod_base = OTHER; note = 2'-fluorouridine
  modified_base 12: mod_base = um
  modified_base 13: mod_base = gm
  modified_base 14: mod_base = um
  modified_base 15: mod_base = um
  modified_base 16: mod_base = OTHER; note = 2'-O-methyladenosine
  modified_base 17: mod_base = gm
  modified_base 18: mod_base = OTHER; note = 2'-O-methyladenosine
  modified_base 19: mod_base = cm
  modified_base 20: mod_base = OTHER; note = 2'-O-methyladenosine
  modified_base 21: mod_base = OTHER; note = 2'-O-methyladenosine
  source 1..21: mol_type = other RNA
ccttttgatgttgttagacaa

SEQ ID NO: 954 - RNA, 21 nt, synthetic construct
  modified_base 1: mod_base = um
  modified_base 2: mod_base = gm
  modified_base 3: mod_base = gm
  modified_base 4: mod_base = um
  modified_base 5: mod_base = OTHER; note = 2'-O-methyladenosine
  modified_base 6: mod_base = OTHER; note = 2'-O-methyladenosine
  modified_base 7: mod_base = um
  modified_base 8: mod_base = gm
  modified_base 9: mod_base = OTHER; note = 2'-fluorocytidine
  modified_base 10: mod_base = OTHER; note = 2'-fluorouridine
  modified_base 11: mod_base = OTHER; note = 2'-fluorouridine
  modified_base 12: mod_base = um
  modified_base 13: mod_base = OTHER; note = 2'-O-methyladenosine
  modified_base 14: mod_base = gm
  modified_base 15: mod_base = OTHER; note = 2'-O-methyladenosine
  modified_base 16: mod_base = um
  modified_base 17: mod_base = cm
  modified_base 18: mod_base = OTHER; note = 2'-O-methyladenosine
  modified_base 19: mod_base = OTHER; note = 2'-O-methyladenosine
  modified_base 20: mod_base = gm
  modified_base 21: mod_base = OTHER; note = 2'-O-methyladenosine
  source 1..21: mol_type = other RNA
tggtaatgctttagatcaaga

SEQ ID NO: 955 - RNA, 21 nt, synthetic construct
  modified_base 1: mod_base = gm
  modified_base 2: mod_base = cm
  modified_base 3: mod_base = OTHER; note = 2'-O-methyladenosine
  modified_base 4: mod_base = um
  modified_base 5: mod_base = OTHER; note = 2'-O-methyladenosine
  modified_base 6: mod_base = cm
  modified_base 7: mod_base = OTHER; note = 2'-O-methyladenosine
  modified_base 8: mod_base = OTHER; note = 2'-O-methyladenosine
  modified_base 9: mod_base = OTHER; note = 2'-fluorouridine
  modified_base 10: mod_base = OTHER; note = 2'-fluoroguanosine
  modified_base 11: mod_base = OTHER; note = 2'-fluorocytidine
  modified_base 12: mod_base = um
  modified_base 13: mod_base = OTHER; note = 2'-O-methyladenosine
  modified_base 14: mod_base = gm
  modified_base 15: mod_base = um
  modified_base 16: mod_base = um
  modified_base 17: mod_base = OTHER; note = 2'-O-methyladenosine
  modified_base 18: mod_base = OTHER; note = 2'-O-methyladenosine
  modified_base 19: mod_base = OTHER; note = 2'-O-methyladenosine
  modified_base 20: mod_base = cm
  modified_base 21: mod_base = OTHER; note = 2'-O-methyladenosine
  source 1..21: mol_type = other RNA
gcatacaatgctagttaaaca

SEQ ID NO: 956 - RNA, 21 nt, synthetic construct
  modified_base 1: mod_base = cm
  modified_base 2: mod_base = OTHER; note = 2-aminoadenosine
  modified_base 3: mod_base = um
  modified_base 4: mod_base = OTHER; note = 2'-O-methyladenosine
  modified_base 5: mod_base = cm
  modified_base 6: mod_base = OTHER; note = 2'-O-methyladenosine
  modified_base 7: mod_base = OTHER; note = 2'-O-methyladenosine
  modified_base 8: mod_base = um
  modified_base 9: mod_base = OTHER; note = 2'-fluoroguanosine
  modified_base 10: mod_base = OTHER; note = 2'-fluorocytidine
  modified_base 11: mod_base = OTHER; note = 2'-fluorouridine
  modified_base 12: mod_base = OTHER; note = 2'-O-methyladenosine
  modified_base 13: mod_base = gm
  modified_base 14: mod_base = um
  modified_base 15: mod_base = um
  modified_base 16: mod_base = OTHER; note = 2'-O-methyladenosine
  modified_base 17: mod_base = OTHER; note = 2'-O-methyladenosine
  modified_base 18: mod_base = OTHER; note = 2'-O-methyladenosine
  modified_base 19: mod_base = cm
  modified_base 20: mod_base = OTHER; note = 2'-O-methyladenosine
  modified_base 21: mod_base = OTHER; note = 2'-O-methyladenosine
  source 1..21: mol_type = other RNA
catacaatgctagttaaacaa

SEQ ID NO: 957 - RNA, 21 nt, synthetic construct
  modified_base 1: mod_base = gm
  modified_base 2: mod_base = um
  modified_base 3: mod_base = gm
  modified_base 4: mod_base = cm
  modified_base 5: mod_base = OTHER; note = 2'-O-methyladenosine
  modified_base 6: mod_base = um
  modified_base 7: mod_base = OTHER; note = 2'-O-methyladenosine
  modified_base 8: mod_base = OTHER; note = 2'-O-methyladenosine
  modified_base 9: mod_base = OTHER; note = 2'-fluorouridine
  modified_base 10: mod_base = OTHER; note = 2'-fluoroguanosine
  modified_base 11: mod_base = OTHER; note = 2'-fluorouridine
  modified_base 12: mod_base = cm
  modified_base 13: mod_base = um
  modified_base 14: mod_base = gm
  modified_base 15: mod_base = OTHER; note = 2'-O-methyladenosine
  modified_base 16: mod_base = um
  modified_base 17: mod_base = OTHER; note = 2'-O-methyladenosine
  modified_base 18: mod_base = gm
  modified_base 19: mod_base = OTHER; note = 2'-O-methyladenosine
  modified_base 20: mod_base = gm
  modified_base 21: mod_base = OTHER; note = 2'-O-methyladenosine
  source 1..21: mol_type = other RNA
gtgcataatgtctgatagaga

SEQ ID NO: 958 - RNA, 21 nt, synthetic construct
  modified_base 1: mod_base = gm
  modified_base 2: mod_base = gm
  modified_base 3: mod_base = um
  modified_base 4: mod_base = cm
  modified_base 5: mod_base = gm
  modified_base 6: mod_base = OTHER; note = 2'-O-methyladenosine
  modified_base 7: mod_base = um
  modified_base 8: mod_base = um
  modified_base 9: mod_base = OTHER; note = 2'-fluorocytidine
  modified_base 10: mod_base = OTHER; note = 2'-fluoroadenosine
  modified_base 11: mod_base = OTHER; note = 2'-fluoroguanosine
  modified_base 12: mod_base = OTHER; note = 2'-O-methyladenosine
  modified_base 13: mod_base = um
  modified_base 14: mod_base = cm
  modified_base 15: mod_base = um
  modified_base 16: mod_base = um
  modified_base 17: mod_base = OTHER; note = 2'-O-methyladenosine
  modified_base 18: mod_base = OTHER; note = 2'-O-methyladenosine
  modified_base 19: mod_base = um
  modified_base 20: mod_base = gm
  modified_base 21: mod_base = OTHER; note = 2'-O-methyladenosine
  source 1..21: mol_type = other RNA
ggtcgattcagatcttaatga

SEQ ID NO: 959 - RNA, 21 nt, synthetic construct
  modified_base 1: mod_base = gm
  modified_base 2: mod_base = gm
  modified_base 3: mod_base = um
  modified_base 4: mod_base = cm
  modified_base 5: mod_base = cm
  modified_base 6: mod_base = OTHER; note = 2'-O-methyladenosine
  modified_base 7: mod_base = gm
  modified_base 8: mod_base = OTHER; note = 2'-O-methyladenosine
  modified_base 9: mod_base = OTHER; note = 2'-fluorouridine
  modified_base 10: mod_base = OTHER; note = 2'-fluoroguanosine
  modified_base 11: mod_base = OTHER; note = 2'-fluoroadenosine
  modified_base 12: mod_base = cm
  modified_base 13: mod_base = cm
  modified_base 14: mod_base = OTHER; note = 2'-O-methyladenosine
  modified_base 15: mod_base = OTHER; note = 2'-O-methyladenosine
  modified_base 16: mod_base = OTHER; note = 2'-O-methyladenosine
  modified_base 17: mod_base = um
  modified_base 18: mod_base = um
  modified_base 19: mod_base = gm
  modified_base 20: mod_base = gm
  modified_base 21: mod_base = OTHER; note = 2'-O-methyladenosine
  source 1..21: mol_type = other RNA
ggtccagatgaccaaattgga

SEQ ID NO: 960 - RNA, 21 nt, synthetic construct
  modified_base 1: mod_base = gm
  modified_base 2: mod_base = cm
  modified_base 3: mod_base = cm
  modified_base 4: mod_base = gm
  modified_base 5: mod_base = cm
  modified_base 6: mod_base = OTHER; note = 2'-O-methyladenosine
  modified_base 7: mod_base = OTHER; note = 2'-O-methyladenosine
  modified_base 8: mod_base = OTHER; note = 2'-O-methyladenosine
  modified_base 9: mod_base = OTHER; note = 2'-fluorouridine
  modified_base 10: mod_base = OTHER; note = 2'-fluorouridine
  modified_base 11: mod_base = OTHER; note = 2'-fluoroguanosine
  modified_base 12: mod_base = cm
  modified_base 13: mod_base = OTHER; note = 2'-O-methyladenosine
  modified_base 14: mod_base = cm
  modified_base 15: mod_base = OTHER; note = 2'-O-methyladenosine
  modified_base 16: mod_base = OTHER; note = 2'-O-methyladenosine
  modified_base 17: mod_base = um
  modified_base 18: mod_base = um
  modified_base 19: mod_base = um
  modified_base 20: mod_base = gm
  modified_base 21: mod_base = OTHER; note = 2'-O-methyladenosine
  source 1..21: mol_type = other RNA
gccgcaaattgcacaatttga

SEQ ID NO: 961 - RNA, 21 nt, synthetic construct
  modified_base 1: mod_base = gm
  modified_base 2: mod_base = um
  modified_base 3: mod_base = gm
  modified_base 4: mod_base = OTHER; note = 2'-O-methyladenosine
  modified_base 5: mod_base = cm
  modified_base 6: mod_base = gm
  modified_base 7: mod_base = cm
  modified_base 8: mod_base = OTHER; note = 2'-O-methyladenosine
  modified_base 9: mod_base = OTHER; note = 2'-fluorouridine
  modified_base 10: mod_base = OTHER; note = 2'-fluoroadenosine
  modified_base 11: mod_base = OTHER; note = 2'-fluorocytidine
  modified_base 12: mod_base = OTHER; note = 2'-O-methyladenosine
  modified_base 13: mod_base = OTHER; note = 2'-O-methyladenosine
  modified_base 14: mod_base = OTHER; note = 2'-O-methyladenosine
  modified_base 15: mod_base = OTHER; note = 2'-O-methyladenosine
  modified_base 16: mod_base = cm
  modified_base 17: mod_base = OTHER; note = 2'-O-methyladenosine
  modified_base 18: mod_base = um
  modified_base 19: mod_base = um
  modified_base 20: mod_base = cm
  modified_base 21: mod_base = OTHER; note = 2'-O-methyladenosine
  source 1..21: mol_type = other RNA
gtgacgcatacaaaacattca

SEQ ID NO: 962 - RNA, 21 nt, synthetic construct
  modified_base 1: mod_base = cm
  modified_base 2: mod_base = OTHER; note = 2-aminoadenosine
  modified_base 3: mod_base = OTHER; note = 2'-O-methyladenosine
  modified_base 4: mod_base = gm
  modified_base 5: mod_base = gm
  modified_base 6: mod_base = OTHER; note = 2'-O-methyladenosine
  modified_base 7: mod_base = OTHER; note = 2'-O-methyladenosine
  modified_base 8: mod_base = gm
  modified_base 9: mod_base = OTHER; note = 2'-fluoroadenosine
  modified_base 10: mod_base = OTHER; note = 2'-fluorocytidine
  modified_base 11: mod_base = OTHER; note = 2'-fluorocytidine
  modified_base 12: mod_base = um
  modified_base 13: mod_base = um
  modified_base 14: mod_base = OTHER; note = 2'-O-methyladenosine
  modified_base 15: mod_base = OTHER; note = 2'-O-methyladenosine
  modified_base 16: mod_base = OTHER; note = 2'-O-methyladenosine
  modified_base 17: mod_base = um
  modified_base 18: mod_base = um
  modified_base 19: mod_base = cm
  modified_base 20: mod_base = cm
  modified_base 21: mod_base = OTHER; note = 2'-O-methyladenosine
  source 1..21: mol_type = other RNA
caaggaagaccttaaattcca

SEQ ID NO: 963 - RNA, 21 nt, synthetic construct
  modified_base 1: mod_base = gm
  modified_base 2: mod_base = um
  modified_base 3: mod_base = cm
  modified_base 4: mod_base = cm
  modified_base 5: mod_base = OTHER; note = 2'-O-methyladenosine
  modified_base 6: mod_base = OTHER; note = 2'-O-methyladenosine
  modified_base 7: mod_base = um
  modified_base 8: mod_base = um
  modified_base 9: mod_base = OTHER; note = 2'-fluoroadenosine
  modified_base 10: mod_base = OTHER; note = 2'-fluoroadenosine
  modified_base 11: mod_base = OTHER; note = 2'-fluorocytidine
  modified_base 12: mod_base = OTHER; note = 2'-O-methyladenosine
  modified_base 13: mod_base = cm
  modified_base 14: mod_base = cm
  modified_base 15: mod_base = OTHER; note = 2'-O-methyladenosine
  modified_base 16: mod_base = OTHER; note = 2'-O-methyladenosine
  modified_base 17: mod_base = um
  modified_base 18: mod_base = OTHER; note = 2'-O-methyladenosine
  modified_base 19: mod_base = gm
  modified_base 20: mod_base = cm
  modified_base 21: mod_base = OTHER; note = 2'-O-methyladenosine
  source 1..21: mol_type = other RNA
gtccaattaacaccaatagca

SEQ ID NO: 964 - RNA, 21 nt, synthetic construct
  modified_base 1: mod_base = gm
  modified_base 2: mod_base = um
  modified_base 3: mod_base = cm
  modified_base 4: mod_base = cm
  modified_base 5: mod_base = OTHER; note = 2'-O-methyladenosine
  modified_base 6: mod_base = OTHER; note = 2'-O-methyladenosine
  modified_base 7: mod_base = gm
  modified_base 8: mod_base = OTHER; note = 2'-O-methyladenosine
  modified_base 9: mod_base = OTHER; note = 2'-fluorouridine
  modified_base 10: mod_base = OTHER; note = 2'-fluoroguanosine
  modified_base 11: mod_base = OTHER; note = 2'-fluoroguanosine
  modified_base 12: mod_base = um
  modified_base 13: mod_base = OTHER; note = 2'-O-methyladenosine
  modified_base 14: mod_base = um
  modified_base 15: mod_base = um
  modified_base 16: mod_base = um
  modified_base 17: mod_base = cm
  modified_base 18: mod_base = um
  modified_base 19: mod_base = OTHER; note = 2'-O-methyladenosine
  modified_base 20: mod_base = cm
  modified_base 21: mod_base = um
  source 1..21: mol_type = other RNA
gtccaagatggtatttctact

SEQ ID NO: 965 - RNA, 21 nt, synthetic construct
  modified_base 1: mod_base = cm
  modified_base 2: mod_base = OTHER; note = 2-aminoadenosine
  modified_base 3: mod_base = OTHER; note = 2'-O-methyladenosine
  modified_base 4: mod_base = gm
  modified_base 5: mod_base = OTHER; note = 2'-O-methyladenosine
  modified_base 6: mod_base = um
  modified_base 7: mod_base = gm
  modified_base 8: mod_base = gm
  modified_base 9: mod_base = OTHER; note = 2'-fluorouridine
  modified_base 10: mod_base = OTHER; note = 2'-fluoroadenosine
  modified_base 11: mod_base = OTHER; note = 2'-fluorouridine
  modified_base 12: mod_base = um
  modified_base 13: mod_base = um
  modified_base 14: mod_base = cm
  modified_base 15: mod_base = um
  modified_base 16: mod_base = OTHER; note = 2'-O-methyladenosine
  modified_base 17: mod_base = cm
  modified_base 18: mod_base = um
  modified_base 19: mod_base = OTHER; note = 2'-O-methyladenosine
  modified_base 20: mod_base = cm
  modified_base 21: mod_base = OTHER; note = 2'-O-methyladenosine
  source 1..21: mol_type = other RNA
caagatggtatttctactaca

SEQ ID NO: 966 - RNA, 21 nt, synthetic construct
  modified_base 1: mod_base = gm
  modified_base 2: mod_base = um
  modified_base 3: mod_base = gm
  modified_base 4: mod_base = OTHER; note = 2'-O-methyladenosine
  modified_base 5: mod_base = OTHER; note = 2'-O-methyladenosine
  modified_base 6: mod_base = um
  modified_base 7: mod_base = OTHER; note = 2'-O-methyladenosine
  modified_base 8: mod_base = cm
  modified_base 9: mod_base = OTHER; note = 2'-fluoroadenosine
  modified_base 10: mod_base = OTHER; note = 2'-fluorocytidine
  modified_base 11: mod_base = OTHER; note = 2'-fluorocytidine
  modified_base 12: mod_base = OTHER; note = 2'-O-methyladenosine
  modified_base 13: mod_base = OTHER; note = 2'-O-methyladenosine
  modified_base 14: mod_base = OTHER; note = 2'-O-methyladenosine
  modified_base 15: mod_base = OTHER; note = 2'-O-methyladenosine
  modified_base 16: mod_base = gm
  modified_base 17: mod_base = OTHER; note = 2'-O-methyladenosine
  modified_base 18: mod_base = um
  modified_base 19: mod_base = cm
  modified_base 20: mod_base = OTHER; note = 2'-O-methyladenosine
  modified_base 21: mod_base = OTHER; note = 2'-O-methyladenosine
  source 1..21: mol_type = other RNA
gtgaatacaccaaaagatcaa

SEQ ID NO: 967 - RNA, 21 nt, synthetic construct
  modified_base 1: mod_base = cm
  modified_base 2: mod_base = um
  modified_base 3: mod_base = gm
  modified_base 4: mod_base = um
  modified_base 5: mod_base = cm
  modified_base 6: mod_base = OTHER; note = 2'-O-methyladenosine
  modified_base 7: mod_base = cm
  modified_base 8: mod_base = um
  modified_base 9: mod_base = OTHER; note = 2'-fluoroadenosine
  modified_base 10: mod_base = OTHER; note = 2'-fluoroadenosine
  modified_base 11: mod_base = OTHER; note = 2'-fluoroguanosine
  modified_base 12: mod_base = OTHER; note = 2'-O-methyladenosine
  modified_base 13: mod_base = OTHER; note = 2'-O-methyladenosine
  modified_base 14: mod_base = OTHER; note = 2'-O-methyladenosine
  modified_base 15: mod_base = um
  modified_base 16: mod_base = cm
  modified_base 17: mod_base = um
  modified_base 18: mod_base = OTHER; note = 2 -O-methylinosine
  modified_base 19: mod_base = cm
  modified_base 20: mod_base = um
  modified_base 21: mod_base = OTHER; note = 2'-O-methyladenosine
  source 1..21: mol_type = other RNA
ctgtcactaagaaatctncta

SEQ ID NO: 968 - RNA, 21 nt, synthetic construct
  modified_base 1: mod_base = cm
  modified_base 2: mod_base = cm
  modified_base 3: mod_base = OTHER; note = 2'-O-methyladenosine
  modified_base 4: mod_base = cm
  modified_base 5: mod_base = um
  modified_base 6: mod_base = OTHER; note = 2'-O-methyladenosine
  modified_base 7: mod_base = OTHER; note = 2'-O-methyladenosine
  modified_base 8: mod_base = OTHER; note = 2'-O-methyladenosine
  modified_base 9: mod_base = OTHER; note = 2'-fluoroguanosine
  modified_base 10: mod_base = OTHER; note = 2'-fluorocytidine
  modified_base 11: mod_base = OTHER; note = 2'-fluoroadenosine
  modified_base 12: mod_base = um
  modified_base 13: mod_base = OTHER; note = 2'-O-methyladenosine
  modified_base 14: mod_base = cm
  modified_base 15: mod_base = OTHER; note = 2'-O-methyladenosine
  modified_base 16: mod_base = OTHER; note = 2'-O-methyladenosine
  modified_base 17: mod_base = um
  modified_base 18: mod_base = gm
  modified_base 19: mod_base = um
  modified_base 20: mod_base = OTHER; note = 2'-O-methyladenosine
  modified_base 21: mod_base = OTHER; note = 2'-O-methyladenosine
  source 1..21: mol_type = other RNA
ccactaaagcatacaatgtaa

SEQ ID NO: 969 - RNA, 21 nt, synthetic construct
  modified_base 1: mod_base = gm
  modified_base 2: mod_base = cm
  modified_base 3: mod_base = OTHER; note = 2'-O-methyladenosine
  modified_base 4: mod_base = gm
  modified_base 5: mod_base = OTHER; note = 2'-O-methyladenosine
  modified_base 6: mod_base = cm
  modified_base 7: mod_base = OTHER; note = 2'-O-methyladenosine
  modified_base 8: mod_base = OTHER; note = 2'-O-methyladenosine
  modified_base 9: mod_base = OTHER; note = 2'-fluoroguanosine
  modified_base 10: mod_base = OTHER; note = 2'-fluoroguanosine
  modified_base 11: mod_base = OTHER; note = 2'-fluoroadenosine
  modified_base 12: mod_base = OTHER; note = 2'-O-methyladenosine
  modified_base 13: mod_base = cm
  modified_base 14: mod_base = um
  modified_base 15: mod_base = gm
  modified_base 16: mod_base = OTHER; note = 2'-O-methyladenosine
  modified_base 17: mod_base = um
  modified_base 18: mod_base = um
  modified_base 19: mod_base = OTHER; note = 2'-O-methyladenosine
  modified_base 20: mod_base = cm
  modified_base 21: mod_base = OTHER; note = 2'-O-methyladenosine
  source 1..21: mol_type = other RNA
gcagacaaggaactgattaca

SEQ ID NO: 970 - RNA, 21 nt, synthetic construct
  modified_base 1: mod_base = gm
  modified_base 2: mod_base = gm
  modified_base 3: mod_base = OTHER; note = 2'-O-methyladenosine
  modified_base 4: mod_base = cm
  modified_base 5: mod_base = OTHER; note = 2'-O-methyladenosine
  modified_base 6: mod_base = OTHER; note = 2'-O-methyladenosine
  modified_base 7: mod_base = gm
  modified_base 8: mod_base = gm
  modified_base 9: mod_base = OTHER; note = 2'-fluoroadenosine
  modified_base 10: mod_base = OTHER; note = 2'-fluoroadenosine
  modified_base 11: mod_base = OTHER; note = 2'-fluorocytidine
  modified_base 12: mod_base = um
  modified_base 13: mod_base = gm
  modified_base 14: mod_base = OTHER; note = 2'-O-methyladenosine
  modified_base 15: mod_base = um
  modified_base 16: mod_base = um
  modified_base 17: mod_base = OTHER; note = 2'-O-methyladenosine
  modified_base 18: mod_base = cm
  modified_base 19: mod_base = OTHER; note = 2'-O-methyladenosine
  modified_base 20: mod_base = OTHER; note = 2'-O-methyladenosine
  modified_base 21: mod_base = OTHER; note = 2'-O-methyladenosine
  source 1..21: mol_type = other RNA
ggacaaggaactgattacaaa

SEQ ID NO: 971 - RNA, 21 nt, synthetic construct
  modified_base 1: mod_base = gm
  modified_base 2: mod_base = gm
  modified_base 3: mod_base = OTHER; note = 2'-O-methyladenosine
  modified_base 4: mod_base = OTHER; note = 2'-O-methyladenosine
  modified_base 5: mod_base = cm
  modified_base 6: mod_base = um
  modified_base 7: mod_base = gm
  modified_base 8: mod_base = OTHER; note = 2'-O-methyladenosine
  modified_base 9: mod_base = OTHER; note = 2'-fluorouridine
  modified_base 10: mod_base = OTHER; note = 2'-fluorouridine
  modified_base 11: mod_base = OTHER; note = 2'-fluoroadenosine
  modified_base 12: mod_base = cm
  modified_base 13: mod_base = OTHER; note = 2'-O-methyladenosine
  modified_base 14: mod_base = OTHER; note = 2'-O-methyladenosine
  modified_base 15: mod_base = OTHER; note = 2'-O-methyladenosine
  modified_base 16: mod_base = cm
  modified_base 17: mod_base = OTHER; note = 2'-O-methyladenosine
  modified_base 18: mod_base = um
  modified_base 19: mod_base = um
  modified_base 20: mod_base = gm
  modified_base 21: mod_base = OTHER; note = 2'-O-methyladenosine
  source 1..21: mol_type = other RNA
ggaactgattacaaacattga

SEQ ID NO: 972 - RNA, 21 nt, synthetic construct
  modified_base 1: mod_base = gm
  modified_base 2: mod_base = cm
  modified_base 3: mod_base = um
  modified_base 4: mod_base = gm
  modified_base 5: mod_base = OTHER; note = 2'-O-methyladenosine
  modified_base 6: mod_base = OTHER; note = 2'-O-methyladenosine
  modified_base 7: mod_base = um
  modified_base 8: mod_base = OTHER; note = 2'-O-methyladenosine
  modified_base 9: mod_base = OTHER; note = 2'-fluoroadenosine
  modified_base 10: mod_base = OTHER; note = 2'-fluoroguanosine
  modified_base 11: mod_base = OTHER; note = 2'-fluorocytidine
  modified_base 12: mod_base = OTHER; note = 2'-O-methyladenosine
  modified_base 13: mod_base = um
  modified_base 14: mod_base = OTHER; note = 2'-O-methyladenosine
  modified_base 15: mod_base = um
  modified_base 16: mod_base = um
  modified_base 17: mod_base = gm
  modified_base 18: mod_base = OTHER; note = 2'-O-methyladenosine
  modified_base 19: mod_base = cm
  modified_base 20: mod_base = OTHER; note = 2 -O-methylinosine
  modified_base 21: mod_base = OTHER; note = 2'-O-methyladenosine
  source 1..21: mol_type = other RNA
gctgaataagcatattgacna

SEQ ID NO: 973 - RNA, 21 nt, synthetic construct
  modified_base 1: mod_base = gm
  modified_base 1^2: mod_base = OTHER; note = phosphorothioate linkage
  modified_base 2: mod_base = cm
  modified_base 3: mod_base = um
  modified_base 4: mod_base = um
  modified_base 5: mod_base = cm
  modified_base 6: mod_base = um
  modified_base 7: mod_base = um
  modified_base 8: mod_base = OTHER; note = 2'-O-methyladenosine
  modified_base 9: mod_base = OTHER; note = 2'-fluoroadenosine
  modified_base 10: mod_base = OTHER; note = 2'-fluoroguanosine
  modified_base 11: mod_base = OTHER; note = 2'-fluoroadenosine
  modified_base 12: mod_base = gm
  modified_base 13: mod_base = um
  modified_base 14: mod_base = gm
  modified_base 15: mod_base = cm
  modified_base 16: mod_base = um
  modified_base 17: mod_base = um
  modified_base 18: mod_base = OTHER; note = 2'-O-methyladenosine
  modified_base 19: mod_base = um
  modified_base 20: mod_base = gm
  modified_base 21: mod_base = OTHER; note = 2'-O-methyladenosine
  source 1..21: mol_type = other RNA
gcttcttaagagtgcttatga

SEQ ID NO: 974 - RNA, 21 nt, synthetic construct
  modified_base 1: mod_base = cm
  modified_base 1^2: mod_base = OTHER; note = phosphorothioate linkage
  modified_base 2: mod_base = um
  modified_base 3: mod_base = um
  modified_base 4: mod_base = OTHER; note = 2'-O-methyladenosine
  modified_base 5: mod_base = gm
  modified_base 6: mod_base = OTHER; note = 2'-O-methyladenosine
  modified_base 7: mod_base = cm
  modified_base 8: mod_base = OTHER; note = 2'-O-methyladenosine
  modified_base 9: mod_base = OTHER; note = 2'-fluoroadenosine
  modified_base 10: mod_base = OTHER; note = 2'-fluorouridine
  modified_base 11: mod_base = OTHER; note = 2'-fluoroguanosine
  modified_base 12: mod_base = um
  modified_base 13: mod_base = cm
  modified_base 14: mod_base = um
  modified_base 15: mod_base = um
  modified_base 16: mod_base = OTHER; note = 2'-O-methyladenosine
  modified_base 17: mod_base = um
  modified_base 18: mod_base = cm
  modified_base 19: mod_base = um
  modified_base 20: mod_base = OTHER; note = 2'-O-methyladenosine
  modified_base 21: mod_base = OTHER; note = 2'-O-methyladenosine
  source 1..21: mol_type = other RNA
cttagacaatgtcttatctaa

SEQ ID NO: 975 - RNA, 21 nt, synthetic construct
  modified_base 1: mod_base = gm
  modified_base 1^2: mod_base = OTHER; note = phosphorothioate linkage
  modified_base 2: mod_base = cm
  modified_base 3: mod_base = OTHER; note = 2'-O-methyladenosine
  modified_base 4: mod_base = um
  modified_base 5: mod_base = um
  modified_base 6: mod_base = OTHER; note = 2'-O-methyladenosine
  modified_base 7: mod_base = OTHER; note = 2'-O-methyladenosine
  modified_base 8: mod_base = um
  modified_base 9: mod_base = OTHER; note = 2'-fluoroguanosine
  modified_base 10: mod_base = OTHER; note = 2'-fluoroguanosine
  modified_base 11: mod_base = OTHER; note = 2'-fluorocytidine
  modified_base 12: mod_base = OTHER; note = 2'-O-methyladenosine
  modified_base 13: mod_base = OTHER; note = 2'-O-methyladenosine
  modified_base 14: mod_base = um
  modified_base 15: mod_base = cm
  modified_base 16: mod_base = um
  modified_base 17: mod_base = um
  modified_base 18: mod_base = cm
  modified_base 19: mod_base = OTHER; note = 2'-O-methyladenosine
  modified_base 20: mod_base = um
  modified_base 21: mod_base = OTHER; note = 2'-O-methyladenosine
  source 1..21: mol_type = other RNA
gcattaatggcaatcttcata

SEQ ID NO: 976 - RNA, 21 nt, synthetic construct
  modified_base 1: mod_base = gm
  modified_base 1^2: mod_base = OTHER; note = phosphorothioate linkage
  modified_base 2: mod_base = OTHER; note = 2'-O-methyladenosine
  modified_base 3: mod_base = um
  modified_base 4: mod_base = gm
  modified_base 5: mod_base = cm
  modified_base 6: mod_base = um
  modified_base 7: mod_base = um
  modified_base 8: mod_base = OTHER; note = 2'-O-methyladenosine
  modified_base 9: mod_base = OTHER; note = 2'-fluorocytidine
  modified_base 10: mod_base = OTHER; note = 2'-fluoroguanosine
  modified_base 11: mod_base = OTHER; note = 2'-fluorouridine
  modified_base 12: mod_base = um
  modified_base 13: mod_base = OTHER; note = 2'-O-methyladenosine
  modified_base 14: mod_base = OTHER; note = 2'-O-methyladenosine
  modified_base 15: mod_base = um
  modified_base 16: mod_base = OTHER; note = 2'-O-methyladenosine
  modified_base 17: mod_base = cm
  modified_base 18: mod_base = gm
  modified_base 19: mod_base = um
  modified_base 20: mod_base = um
  modified_base 21: mod_base = um
  source 1..21: mol_type = other RNA
gatgcttacgttaatacgttt

SEQ ID NO: 977 - RNA, 21 nt, synthetic construct
  modified_base 1: mod_base = gm
  modified_base 1^2: mod_base = OTHER; note = phosphorothioate linkage
  modified_base 2: mod_base = cm
  modified_base 3: mod_base = OTHER; note = 2'-O-methyladenosine
  modified_base 4: mod_base = cm
  modified_base 5: mod_base = cm
  modified_base 6: mod_base = um
  modified_base 7: mod_base = um
  modified_base 8: mod_base = um
  modified_base 9: mod_base = OTHER; note = 2'-fluoroguanosine
  modified_base 10: mod_base = OTHER; note = 2'-fluoroadenosine
  modified_base 11: mod_base = OTHER; note = 2'-fluorocytidine
  modified_base 12: mod_base = OTHER; note = 2'-O-methyladenosine
  modified_base 13: mod_base = OTHER; note = 2'-O-methyladenosine
  modified_base 14: mod_base = um
  modified_base 15: mod_base = cm
  modified_base 16: mod_base = um
  modified_base 17: mod_base = um
  modified_base 18: mod_base = OTHER; note = 2'-O-methyladenosine
  modified_base 19: mod_base = OTHER; note = 2'-O-methyladenosine
  modified_base 20: mod_base = gm
  modified_base 21: mod_base = OTHER; note = 2'-O-methyladenosine
  source 1..21: mol_type = other RNA
gcacctttgacaatcttaaga

SEQ ID NO: 978 - RNA, 21 nt, synthetic construct
  modified_base 1: mod_base = gm
  modified_base 1^2: mod_base = OTHER; note = phosphorothioate linkage
  modified_base 2: mod_base = gm
  modified_base 3: mod_base = OTHER; note = 2'-O-methyladenosine
  modified_base 4: mod_base = OTHER; note = 2'-O-methyladenosine
  modified_base 5: mod_base = gm
  modified_base 6: mod_base = um
  modified_base 7: mod_base = OTHER; note = 2'-O-methyladenosine
  modified_base 8: mod_base = gm
  modified_base 9: mod_base = OTHER; note = 2'-fluorouridine
  modified_base 10: mod_base = OTHER; note = 2'-fluoroguanosine
  modified_base 11: mod_base = OTHER; note = 2'-fluoroguanosine
  modified_base 12: mod_base = OTHER; note = 2'-O-methyladenosine
  modified_base 13: mod_base = OTHER; note = 2'-O-methyladenosine
  modified_base 14: mod_base = OTHER; note = 2'-O-methyladenosine
  modified_base 15: mod_base = OTHER; note = 2'-O-methyladenosine
  modified_base 16: mod_base = um
  modified_base 17: mod_base = cm
  modified_base 18: mod_base = cm
  modified_base 19: mod_base = um
  modified_base 20: mod_base = OTHER; note = 2'-O-methyladenosine
  modified_base 21: mod_base = OTHER; note = 2'-O-methyladenosine
  source 1..21: mol_type = other RNA
ggaagtagtggaaaatcctaa

SEQ ID NO: 979 - RNA, 21 nt, synthetic construct
  modified_base 1: mod_base = cm
  modified_base 1^2: mod_base = OTHER; note = phosphorothioate linkage
  modified_base 2: mod_base = cm
  modified_base 3: mod_base = um
  modified_base 4: mod_base = um
  modified_base 5: mod_base = um
  modified_base 6: mod_base = um
  modified_base 7: mod_base = gm
  modified_base 8: mod_base = OTHER; note = 2'-O-methyladenosine
  modified_base 9: mod_base = OTHER; note = 2'-fluorouridine
  modified_base 10: mod_base = OTHER; note = 2'-fluoroguanosine
  modified_base 11: mod_base = OTHER; note = 2'-fluorouridine
  modified_base 12: mod_base = um
  modified_base 13: mod_base = gm
  modified_base 14: mod_base = um
  modified_base 15: mod_base = um
  modified_base 16: mod_base = OTHER; note = 2'-O-methyladenosine
  modified_base 17: mod_base = gm
  modified_base 18: mod_base = OTHER; note = 2'-O-methyladenosine
  modified_base 19: mod_base = cm
  modified_base 20: mod_base = OTHER; note = 2'-O-methyladenosine
  modified_base 21: mod_base = OTHER; note = 2'-O-methyladenosine
  source 1..21: mol_type = other RNA
ccttttgatgttgttagacaa

SEQ ID NO: 980 - RNA, 21 nt, synthetic construct
  modified_base 1: mod_base = um
  modified_base 1^2: mod_base = OTHER; note = phosphorothioate linkage
  modified_base 2: mod_base = gm
  modified_base 3: mod_base = gm
  modified_base 4: mod_base = um
  modified_base 5: mod_base = OTHER; note = 2'-O-methyladenosine
  modified_base 6: mod_base = OTHER; note = 2'-O-methyladenosine
  modified_base 7: mod_base = um
  modified_base 8: mod_base = gm
  modified_base 9: mod_base = OTHER; note = 2'-fluorocytidine
  modified_base 10: mod_base = OTHER; note = 2'-fluorouridine
  modified_base 11: mod_base = OTHER; note = 2'-fluorouridine
  modified_base 12: mod_base = um
  modified_base 13: mod_base = OTHER; note = 2'-O-methyladenosine
  modified_base 14: mod_base = gm
  modified_base 15: mod_base = OTHER; note = 2'-O-methyladenosine
  modified_base 16: mod_base = um
  modified_base 17: mod_base = cm
  modified_base 18: mod_base = OTHER; note = 2'-O-methyladenosine
  modified_base 19: mod_base = OTHER; note = 2'-O-methyladenosine
  modified_base 20: mod_base = gm
  modified_base 21: mod_base = OTHER; note = 2'-O-methyladenosine
  source 1..21: mol_type = other RNA
tggtaatgctttagatcaaga

SEQ ID NO: 981 - RNA, 21 nt, synthetic construct
  modified_base 1: mod_base = cm
  modified_base 1^2: mod_base = OTHER; note = phosphorothioate linkage
  modified_base 2: mod_base = OTHER; note = 2'-O-methyladenosine
  modified_base 3: mod_base = OTHER; note = 2'-O-methyladenosine
  modified_base 4: mod_base = gm
  modified_base 5: mod_base = cm
  modified_base 6: mod_base = um
  modified_base 7: mod_base = OTHER; note = 2'-O-methyladenosine
  modified_base 8: mod_base = um
  modified_base 9: mod_base = OTHER; note = 2'-fluoroguanosine
  modified_base 10: mod_base = OTHER; note = 2'-fluoroadenosine
  modified_base 11: mod_base = OTHER; note = 2'-fluorocytidine
  modified_base 12: mod_base = cm
  modified_base 13: mod_base = cm
  modified_base 14: mod_base = OTHER; note = 2'-O-methyladenosine
  modified_base 15: mod_base = OTHER; note = 2'-O-methyladenosine
  modified_base 16: mod_base = OTHER; note = 2'-O-methyladenosine
  modified_base 17: mod_base = um
  modified_base 18: mod_base = gm
  modified_base 19: mod_base = um
  modified_base 20: mod_base = OTHER; note = 2'-O-methyladenosine
  modified_base 21: mod_base = um
  source 1..21: mol_type = other RNA
caagctatgacccaaatgtat

SEQ ID NO: 982 - RNA, 21 nt, synthetic construct
  modified_base 1: mod_base = gm
  modified_base 1^2: mod_base = OTHER; note = phosphorothioate linkage
  modified_base 2: mod_base = um
  modified_base 3: mod_base = cm
  modified_base 4: mod_base = cm
  modified_base 5: mod_base = OTHER; note = 2'-O-methyladenosine
  modified_base 6: mod_base = OTHER; note = 2'-O-methyladenosine
  modified_base 7: mod_base = gm
  modified_base 8: mod_base = OTHER; note = 2'-O-methyladenosine
  modified_base 9: mod_base = OTHER; note = 2'-fluorouridine
  modified_base 10: mod_base = OTHER; note = 2'-fluoroguanosine
  modified_base 11: mod_base = OTHER; note = 2'-fluoroguanosine
  modified_base 12: mod_base = um
  modified_base 13: mod_base = OTHER; note = 2'-O-methyladenosine
  modified_base 14: mod_base = um
  modified_base 15: mod_base = um
  modified_base 16: mod_base = um
  modified_base 17: mod_base = cm
  modified_base 18: mod_base = um
  modified_base 19: mod_base = OTHER; note = 2'-O-methyladenosine
  modified_base 20: mod_base = cm
  modified_base 21: mod_base = um
  source 1..21: mol_type = other RNA
gtccaagatggtatttctact

SEQ ID NO: 983 - RNA, 21 nt, synthetic construct
  modified_base 1: mod_base = cm
  modified_base 1^2: mod_base = OTHER; note = phosphorothioate linkage
  modified_base 2: mod_base = OTHER; note = 2'-O-methyladenosine
  modified_base 3: mod_base = OTHER; note = 2'-O-methyladenosine
  modified_base 4: mod_base = gm
  modified_base 5: mod_base = OTHER; note = 2'-O-methyladenosine
  modified_base 6: mod_base = um
  modified_base 7: mod_base = gm
  modified_base 8: mod_base = gm
  modified_base 9: mod_base = OTHER; note = 2'-fluorouridine
  modified_base 10: mod_base = OTHER; note = 2'-fluoroadenosine
  modified_base 11: mod_base = OTHER; note = 2'-fluorouridine
  modified_base 12: mod_base = um
  modified_base 13: mod_base = um
  modified_base 14: mod_base = cm
  modified_base 15: mod_base = um
  modified_base 16: mod_base = OTHER; note = 2'-O-methyladenosine
  modified_base 17: mod_base = cm
  modified_base 18: mod_base = um
  modified_base 19: mod_base = OTHER; note = 2'-O-methyladenosine
  modified_base 20: mod_base = cm
  modified_base 21: mod_base = OTHER; note = 2'-O-methyladenosine
  source 1..21: mol_type = other RNA
caagatggtatttctactaca

SEQ ID NO: 984 - RNA, 21 nt, synthetic construct
  modified_base 1: mod_base = cm
  modified_base 1^2: mod_base = OTHER; note = phosphorothioate linkage
  modified_base 2: mod_base = cm
  modified_base 3: mod_base = OTHER; note = 2'-O-methyladenosine
  modified_base 4: mod_base = cm
  modified_base 5: mod_base = um
  modified_base 6: mod_base = OTHER; note = 2'-O-methyladenosine
  modified_base 7: mod_base = OTHER; note = 2'-O-methyladenosine
  modified_base 8: mod_base = OTHER; note = 2'-O-methyladenosine
  modified_base 9: mod_base = OTHER; note = 2'-fluoroguanosine
  modified_base 10: mod_base = OTHER; note = 2'-fluorocytidine
  modified_base 11: mod_base = OTHER; note = 2'-fluoroadenosine
  modified_base 12: mod_base = um
  modified_base 13: mod_base = OTHER; note = 2'-O-methyladenosine
  modified_base 14: mod_base = cm
  modified_base 15: mod_base = OTHER; note = 2'-O-methyladenosine
  modified_base 16: mod_base = OTHER; note = 2'-O-methyladenosine
  modified_base 17: mod_base = um
  modified_base 18: mod_base = gm
  modified_base 19: mod_base = um
  modified_base 20: mod_base = OTHER; note = 2'-O-methyladenosine
  modified_base 21: mod_base = OTHER; note = 2'-O-methyladenosine
  source 1..21: mol_type = other RNA
ccactaaagcatacaatgtaa

SEQ ID NO: 985 - RNA, 21 nt, synthetic construct
  modified_base 1: mod_base = gm
  modified_base 1^2: mod_base = OTHER; note = phosphorothioate linkage
  modified_base 2: mod_base = gm
  modified_base 3: mod_base = OTHER; note = 2'-O-methyladenosine
  modified_base 4: mod_base = cm
  modified_base 5: mod_base = OTHER; note = 2'-O-methyladenosine
  modified_base 6: mod_base = OTHER; note = 2'-O-methyladenosine
  modified_base 7: mod_base = gm
  modified_base 8: mod_base = gm
  modified_base 9: mod_base = OTHER; note = 2'-fluoroadenosine
  modified_base 10: mod_base = OTHER; note = 2'-fluoroadenosine
  modified_base 11: mod_base = OTHER; note = 2'-fluorocytidine
  modified_base 12: mod_base = um
  modified_base 13: mod_base = gm
  modified_base 14: mod_base = OTHER; note = 2'-O-methyladenosine
  modified_base 15: mod_base = um
  modified_base 16: mod_base = um
  modified_base 17: mod_base = OTHER; note = 2'-O-methyladenosine
  modified_base 18: mod_base = cm
  modified_base 19: mod_base = OTHER; note = 2'-O-methyladenosine
  modified_base 20: mod_base = OTHER; note = 2'-O-methyladenosine
  modified_base 21: mod_base = OTHER; note = 2'-O-methyladenosine
  source 1..21: mol_type = other RNA
ggacaaggaactgattacaaa

SEQ ID NO: 986 - RNA, 21 nt, synthetic construct
  modified_base 1: mod_base = gm
  modified_base 1^2: mod_base = OTHER; note = phosphorothioate linkage
  modified_base 2: mod_base = cm
  modified_base 3: mod_base = OTHER; note = 2'-O-methyladenosine
  modified_base 4: mod_base = um
  modified_base 5: mod_base = gm
  modified_base 6: mod_base = gm
  modified_base 7: mod_base = um
  modified_base 8: mod_base = OTHER; note = 2'-O-methyladenosine
  modified_base 9: mod_base = OTHER; note = 2'-fluorocytidine
  modified_base 10: mod_base = OTHER; note = 2'-fluorocytidine
  modified_base 11: mod_base = OTHER; note = 2'-fluoroadenosine
  modified_base 12: mod_base = cm
  modified_base 13: mod_base = OTHER; note = 2'-O-methyladenosine
  modified_base 14: mod_base = um
  modified_base 15: mod_base = OTHER; note = 2'-O-methyladenosine
  modified_base 16: mod_base = um
  modified_base 17: mod_base = OTHER; note = 2'-O-methyladenosine
  modified_base 18: mod_base = um
  modified_base 19: mod_base = cm
  modified_base 20: mod_base = OTHER; note = 2'-O-methyladenosine
  modified_base 21: mod_base = OTHER; note = 2'-O-methyladenosine
  source 1..21: mol_type = other RNA
gcatggtaccacatatatcaa

SEQ ID NO: 987 - RNA, 21 nt, synthetic construct
  modified_base 1: mod_base = gm
  modified_base 1^2: mod_base = OTHER; note = phosphorothioate linkage
  modified_base 2: mod_base = um
  modified_base 3: mod_base = OTHER; note = 2'-O-methyladenosine
  modified_base 4: mod_base = cm
  modified_base 5: mod_base = um
  modified_base 6: mod_base = gm
  modified_base 7: mod_base = OTHER; note = 2'-O-methyladenosine
  modified_base 8: mod_base = cm
  modified_base 9: mod_base = OTHER; note = 2'-fluoroadenosine
  modified_base 10: mod_base = OTHER; note = 2'-fluorouridine
  modified_base 11: mod_base = OTHER; note = 2'-fluorouridine
  modified_base 12: mod_base = OTHER; note = 2'-O-methyladenosine
  modified_base 13: mod_base = gm
  modified_base 14: mod_base = OTHER; note = 2'-O-methyladenosine
  modified_base 15: mod_base = um
  modified_base 16: mod_base = OTHER; note = 2'-O-methyladenosine
  modified_base 17: mod_base = OTHER; note = 2'-O-methyladenosine
  modified_base 18: mod_base = um
  modified_base 19: mod_base = cm
  modified_base 20: mod_base = OTHER; note = 2'-O-methyladenosine
  modified_base 21: mod_base = OTHER; note = 2'-O-methyladenosine
  source 1..21: mol_type = other RNA
gtactgacattagataatcaa

SEQ ID NO: 988 - RNA, 21 nt, synthetic construct
  modified_base 1: mod_base = gm
  modified_base 1^2: mod_base = OTHER; note = phosphorothioate linkage
  modified_base 2: mod_base = gm
  modified_base 3: mod_base = OTHER; note = 2'-O-methyladenosine
  modified_base 4: mod_base = um
  modified_base 5: mod_base = gm
  modified_base 6: mod_base = um
  modified_base 7: mod_base = OTHER; note = 2'-O-methyladenosine
  modified_base 8: mod_base = OTHER; note = 2'-O-methyladenosine
  modified_base 9: mod_base = OTHER; note = 2'-fluoroadenosine
  modified_base 10: mod_base = OTHER; note = 2'-fluorocytidine
  modified_base 11: mod_base = OTHER; note = 2'-fluorouridine
  modified_base 12: mod_base = um
  modified_base 13: mod_base = OTHER; note = 2'-O-methyladenosine
  modified_base 14: mod_base = cm
  modified_base 15: mod_base = OTHER; note = 2'-O-methyladenosine
  modified_base 16: mod_base = um
  modified_base 17: mod_base = OTHER; note = 2'-O-methyladenosine
  modified_base 18: mod_base = gm
  modified_base 19: mod_base = cm
  modified_base 20: mod_base = um
  modified_base 21: mod_base = OTHER; note = 2'-O-methyladenosine
  source 1..21: mol_type = other RNA
ggatgtaaacttacatagcta

SEQ ID NO: 989 - RNA, 21 nt, synthetic construct
  modified_base 1: mod_base = cm
  modified_base 1^2: mod_base = OTHER; note = phosphorothioate linkage
  modified_base 2: mod_base = OTHER; note = 2'-O-methyladenosine
  modified_base 3: mod_base = um
  modified_base 4: mod_base = OTHER; note = 2'-O-methyladenosine
  modified_base 5: mod_base = cm
  modified_base 6: mod_base = OTHER; note = 2'-O-methyladenosine
  modified_base 7: mod_base = OTHER; note = 2'-O-methyladenosine
  modified_base 8: mod_base = um
  modified_base 9: mod_base = OTHER; note = 2'-fluoroguanosine
  modified_base 10: mod_base = OTHER; note = 2'-fluorocytidine
  modified_base 11: mod_base = OTHER; note = 2'-fluorouridine
  modified_base 12: mod_base = OTHER; note = 2'-O-methyladenosine
  modified_base 13: mod_base = gm
  modified_base 14: mod_base = um
  modified_base 15: mod_base = um
  modified_base 16: mod_base = OTHER; note = 2'-O-methyladenosine
  modified_base 17: mod_base = OTHER; note = 2'-O-methyladenosine
  modified_base 18: mod_base = OTHER; note = 2'-O-methyladenosine
  modified_base 19: mod_base = cm
  modified_base 20: mod_base = OTHER; note = 2'-O-methyladenosine
  modified_base 21: mod_base = OTHER; note = 2'-O-methyladenosine
  source 1..21: mol_type = other RNA
catacaatgctagttaaacaa

SEQ ID NO: 990 - RNA, 21 nt, synthetic construct
  modified_base 1: mod_base = um
  modified_base 1^2: mod_base = OTHER; note = phosphorothioate linkage
  modified_base 2: mod_base = gm
  modified_base 3: mod_base = cm
  modified_base 4: mod_base = um
  modified_base 5: mod_base = gm
  modified_base 6: mod_base = um
  modified_base 7: mod_base = gm
  modified_base 8: mod_base = gm
  modified_base 9: mod_base = OTHER; note = 2'-fluorouridine
  modified_base 10: mod_base = um
  modified_base 11: mod_base = OTHER; note = 2'-fluoroadenosine
  modified_base 12: mod_base = um
  modified_base 13: mod_base = OTHER; note = 2'-fluoroadenosine
  modified_base 14: mod_base = cm
  modified_base 15: mod_base = cm
  modified_base 16: mod_base = um
  modified_base 17: mod_base = OTHER; note = 2'-O-methyladenosine
  modified_base 18: mod_base = cm
  modified_base 19: mod_base = um
  modified_base 20: mod_base = OTHER; note = 2'-O-methyladenosine
  modified_base 21: mod_base = OTHER; note = 2'-O-methyladenosine
  source 1..21: mol_type = other RNA
tgctgtggttatacctactaa

SEQ ID NO: 991 - RNA, 21 nt, synthetic construct
  modified_base 1: mod_base = gm
  modified_base 1^2: mod_base = OTHER; note = phosphorothioate linkage
  modified_base 2: mod_base = cm
  modified_base 3: mod_base = OTHER; note = 2'-O-methyladenosine
  modified_base 4: mod_base = OTHER; note = 2'-O-methyladenosine
  modified_base 5: mod_base = um
  modified_base 6: mod_base = cm
  modified_base 7: mod_base = OTHER; note = 2'-fluorouridine
  modified_base 8: mod_base = um
  modified_base 9: mod_base = OTHER; note = 2'-fluoroadenosine
  modified_base 10: mod_base = OTHER; note = 2'-O-methyladenosine
  modified_base 11: mod_base = OTHER; note = 2'-fluoroguanosine
  modified_base 12: mod_base = OTHER; note = 2'-O-methyladenosine
  modified_base 13: mod_base = cm
  modified_base 14: mod_base = OTHER; note = 2'-O-methyladenosine
  modified_base 15: mod_base = cm
  modified_base 16: mod_base = um
  modified_base 17: mod_base = um
  modified_base 18: mod_base = cm
  modified_base 19: mod_base = um
  modified_base 20: mod_base = um
  modified_base 21: mod_base = um
  source 1..21: mol_type = other RNA
gcaatcttaagacacttcttt

SEQ ID NO: 992 - RNA, 21 nt, synthetic construct
  modified_base 1: mod_base = gm
  modified_base 1^2: mod_base = OTHER; note = phosphorothioate linkage
  modified_base 2: mod_base = cm
  modified_base 3: mod_base = um
  modified_base 4: mod_base = gm
  modified_base 5: mod_base = OTHER; note = 2'-O-methyladenosine
  modified_base 6: mod_base = OTHER; note = 2'-O-methyladenosine
  modified_base 7: mod_base = OTHER; note = 2'-fluorouridine
  modified_base 8: mod_base = OTHER; note = 2'-O-methyladenosine
  modified_base 9: mod_base = OTHER; note = 2'-fluoroadenosine
  modified_base 10: mod_base = gm
  modified_base 11: mod_base = OTHER; note = 2'-fluorocytidine
  modified_base 12: mod_base = OTHER; note = 2'-O-methyladenosine
  modified_base 13: mod_base = um
  modified_base 14: mod_base = OTHER; note = 2'-O-methyladenosine
  modified_base 15: mod_base = um
  modified_base 16: mod_base = um
  modified_base 17: mod_base = gm
  modified_base 18: mod_base = OTHER; note = 2'-O-methyladenosine
  modified_base 19: mod_base = cm
  modified_base 20: mod_base = OTHER; note = 2 -O-methylinosine
  modified_base 21: mod_base = OTHER; note = 2'-O-methyladenosine
  source 1..21: mol_type = other RNA
gctgaataagcatattgacna

SEQ ID NO: 993 - RNA, 21 nt, synthetic construct
  modified_base 1: mod_base = gm
  modified_base 2: mod_base = cm
  modified_base 3: mod_base = um
  modified_base 4: mod_base = um
  modified_base 5: mod_base = cm
  modified_base 6: mod_base = um
  modified_base 7: mod_base = um
  modified_base 8: mod_base = OTHER; note = 2'-O-methyladenosine
  modified_base 9: mod_base = OTHER; note = 2'-fluoroadenosine
  modified_base 10: mod_base = OTHER; note = 2'-fluoroguanosine
  modified_base 11: mod_base = OTHER; note = 2'-fluoroadenosine
  modified_base 12: mod_base = gm
  modified_base 13: mod_base = um
  modified_base 14: mod_base = gm
  modified_base 15: mod_base = cm
  modified_base 16: mod_base = um
  modified_base 17: mod_base = um
  modified_base 18: mod_base = OTHER; note = 2'-O-methyladenosine
  modified_base 19: mod_base = um
  modified_base 20: mod_base = gm
  modified_base 21: mod_base = OTHER; note = 2'-O-methyladenosine
  source 1..21: mol_type = other RNA
gcttcttaagagtgcttatga

SEQ ID NO: 994 - RNA, 21 nt, synthetic construct
  modified_base 1: mod_base = cm
  modified_base 2: mod_base = um
  modified_base 3: mod_base = um
  modified_base 4: mod_base = cm
  modified_base 5: mod_base = um
  modified_base 6: mod_base = um
  modified_base 7: mod_base = OTHER; note = 2'-O-methyladenosine
  modified_base 8: mod_base = OTHER; note = 2'-O-methyladenosine
  modified_base 9: mod_base = OTHER; note = 2'-fluoroguanosine
  modified_base 10: mod_base = OTHER; note = 2'-fluoroadenosine
  modified_base 11: mod_base = OTHER; note = 2'-fluoroguanosine
  modified_base 12: mod_base = um
  modified_base 13: mod_base = gm
  modified_base 14: mod_base = cm
  modified_base 15: mod_base = um
  modified_base 16: mod_base = um
  modified_base 17: mod_base = OTHER; note = 2'-O-methyladenosine
  modified_base 18: mod_base = um
  modified_base 19: mod_base = gm
  modified_base 20: mod_base = OTHER; note = 2'-O-methyladenosine
  modified_base 21: mod_base = OTHER; note = 2'-O-methyladenosine
  source 1..21: mol_type = other RNA
cttcttaagagtgcttatgaa

SEQ ID NO: 995 - RNA, 21 nt, synthetic construct
  modified_base 1: mod_base = cm
  modified_base 2: mod_base = um
  modified_base 3: mod_base = um
  modified_base 4: mod_base = OTHER; note = 2'-O-methyladenosine
  modified_base 5: mod_base = gm
  modified_base 6: mod_base = OTHER; note = 2'-O-methyladenosine
  modified_base 7: mod_base = cm
  modified_base 8: mod_base = OTHER; note = 2'-O-methyladenosine
  modified_base 9: mod_base = OTHER; note = 2'-fluoroadenosine
  modified_base 10: mod_base = OTHER; note = 2'-fluorouridine
  modified_base 11: mod_base = OTHER; note = 2'-fluoroguanosine
  modified_base 12: mod_base = um
  modified_base 13: mod_base = cm
  modified_base 14: mod_base = um
  modified_base 15: mod_base = um
  modified_base 16: mod_base = OTHER; note = 2'-O-methyladenosine
  modified_base 17: mod_base = um
  modified_base 18: mod_base = cm
  modified_base 19: mod_base = um
  modified_base 20: mod_base = OTHER; note = 2'-O-methyladenosine
  modified_base 21: mod_base = OTHER; note = 2'-O-methyladenosine
  source 1..21: mol_type = other RNA
cttagacaatgtcttatctaa

SEQ ID NO: 996 - RNA, 21 nt, synthetic construct
  modified_base 1: mod_base = gm
  modified_base 2: mod_base = cm
  modified_base 3: mod_base = OTHER; note = 2'-O-methyladenosine
  modified_base 4: mod_base = cm
  modified_base 5: mod_base = cm
  modified_base 6: mod_base = um
  modified_base 7: mod_base = um
  modified_base 8: mod_base = um
  modified_base 9: mod_base = OTHER; note = 2'-fluoroguanosine
  modified_base 10: mod_base = OTHER; note = 2'-fluoroadenosine
  modified_base 11: mod_base = OTHER; note = 2'-fluorocytidine
  modified_base 12: mod_base = OTHER; note = 2'-O-methyladenosine
  modified_base 13: mod_base = OTHER; note = 2'-O-methyladenosine
  modified_base 14: mod_base = um
  modified_base 15: mod_base = cm
  modified_base 16: mod_base = um
  modified_base 17: mod_base = um
  modified_base 18: mod_base = OTHER; note = 2'-O-methyladenosine
  modified_base 19: mod_base = OTHER; note = 2'-O-methyladenosine
  modified_base 20: mod_base = gm
  modified_base 21: mod_base = OTHER; note = 2'-O-methyladenosine
  source 1..21: mol_type = other RNA
gcacctttgacaatcttaaga

SEQ ID NO: 997 - RNA, 21 nt, synthetic construct
  modified_base 1: mod_base = gm
  modified_base 2: mod_base = gm
  modified_base 3: mod_base = OTHER; note = 2'-O-methyladenosine
  modified_base 4: mod_base = OTHER; note = 2'-O-methyladenosine
  modified_base 5: mod_base = gm
  modified_base 6: mod_base = um
  modified_base 7: mod_base = OTHER; note = 2'-O-methyladenosine
  modified_base 8: mod_base = gm
  modified_base 9: mod_base = OTHER; note = 2'-fluorouridine
  modified_base 10: mod_base = OTHER; note = 2'-fluoroguanosine
  modified_base 11: mod_base = OTHER; note = 2'-fluoroguanosine
  modified_base 12: mod_base = OTHER; note = 2'-O-methyladenosine
  modified_base 13: mod_base = OTHER; note = 2'-O-methyladenosine
  modified_base 14: mod_base = OTHER; note = 2'-O-methyladenosine
  modified_base 15: mod_base = OTHER; note = 2'-O-methyladenosine
  modified_base 16: mod_base = um
  modified_base 17: mod_base = cm
  modified_base 18: mod_base = cm
  modified_base 19: mod_base = um
  modified_base 20: mod_base = OTHER; note = 2'-O-methyladenosine
  modified_base 21: mod_base = OTHER; note = 2'-O-methyladenosine
  source 1..21: mol_type = other RNA
ggaagtagtggaaaatcctaa

SEQ ID NO: 998 - RNA, 21 nt, synthetic construct
  modified_base 1: mod_base = gm
  modified_base 1^2: mod_base = OTHER; note = phosphorothioate linkage
  modified_base 2: mod_base = gm
  modified_base 2^3: mod_base = OTHER; note = phosphorothioate linkage
  modified_base 3: mod_base = OTHER; note = 2'-O-methyladenosine
  modified_base 4: mod_base = OTHER; note = 2'-O-methyladenosine
  modified_base 5: mod_base = gm
  modified_base 6: mod_base = um
  modified_base 7: mod_base = OTHER; note = 2'-O-methyladenosine
  modified_base 8: mod_base = gm
  modified_base 9: mod_base = OTHER; note = 2'-fluorouridine
  modified_base 10: mod_base = OTHER; note = 2'-fluoroguanosine
  modified_base 11: mod_base = OTHER; note = 2'-fluoroguanosine
  modified_base 12: mod_base = OTHER; note = 2'-O-methyladenosine
  modified_base 13: mod_base = OTHER; note = 2'-O-methyladenosine
  modified_base 14: mod_base = OTHER; note = 2'-O-methyladenosine
  modified_base 15: mod_base = OTHER; note = 2'-O-methyladenosine
  modified_base 16: mod_base = um
  modified_base 17: mod_base = cm
  modified_base 18: mod_base = cm
  modified_base 19: mod_base = um
  modified_base 20: mod_base = OTHER; note = 2'-O-methyladenosine
  modified_base 20^21: mod_base = OTHER; note = phosphorothioate linkage
  modified_base 21: mod_base = OTHER; note = 2'-O-methyladenosine
  source 1..21: mol_type = other RNA
ggaagtagtggaaaatcctaa

SEQ ID NO: 999 - RNA, 21 nt, synthetic construct
  modified_base 1: mod_base = gm
  modified_base 1^2: mod_base = OTHER; note = phosphorothioate linkage
  modified_base 2: mod_base = um
  modified_base 3: mod_base = cm
  modified_base 4: mod_base = cm
  modified_base 5: mod_base = OTHER; note = 2'-O-methyladenosine
  modified_base 6: mod_base = OTHER; note = 2'-O-methyladenosine
  modified_base 7: mod_base = gm
  modified_base 8: mod_base = OTHER; note = 2'-O-methyladenosine
  modified_base 9: mod_base = OTHER; note = 2'-fluorouridine
  modified_base 10: mod_base = OTHER; note = 2'-fluoroguanosine
  modified_base 11: mod_base = OTHER; note = 2'-fluoroguanosine
  modified_base 12: mod_base = um
  modified_base 13: mod_base = OTHER; note = 2'-O-methyladenosine
  modified_base 14: mod_base = um
  modified_base 15: mod_base = um
  modified_base 16: mod_base = um
  modified_base 17: mod_base = cm
  modified_base 18: mod_base = um
  modified_base 19: mod_base = OTHER; note = 2'-O-methyladenosine
  modified_base 20: mod_base = cm
  modified_base 21: mod_base = OTHER; note = 2'-O-methyladenosine
  source 1..21: mol_type = other RNA
gtccaagatggtatttctaca

SEQ ID NO: 1000 - RNA, 21 nt, synthetic construct
  modified_base 1: mod_base = cm
  modified_base 2: mod_base = OTHER; note = 2'-O-methyladenosine
  modified_base 3: mod_base = um
  modified_base 4: mod_base = OTHER; note = 2'-O-methyladenosine
  modified_base 5: mod_base = cm
  modified_base 6: mod_base = OTHER; note = 2'-O-methyladenosine
  modified_base 7: mod_base = OTHER; note = 2'-O-methyladenosine
  modified_base 8: mod_base = um
  modified_base 9: mod_base = OTHER; note = 2'-fluoroguanosine
  modified_base 10: mod_base = OTHER; note = 2'-fluorocytidine
  modified_base 11: mod_base = OTHER; note = 2'-fluorouridine
  modified_base 12: mod_base = OTHER; note = 2'-O-methyladenosine
  modified_base 13: mod_base = gm
  modified_base 14: mod_base = um
  modified_base 15: mod_base = um
  modified_base 16: mod_base = OTHER; note = 2'-O-methyladenosine
  modified_base 17: mod_base = OTHER; note = 2'-O-methyladenosine
  modified_base 18: mod_base = OTHER; note = 2'-O-methyladenosine
  modified_base 19: mod_base = cm
  modified_base 20: mod_base = OTHER; note = 2'-O-methyladenosine
  modified_base 21: mod_base = OTHER; note = 2'-O-methyladenosine
  source 1..21: mol_type = other RNA
catacaatgctagttaaacaa

SEQ ID NO: 1001 - RNA, 21 nt, synthetic construct
  modified_base 1: mod_base = cm
  modified_base 2: mod_base = OTHER; note = 2'-O-methyladenosine
  modified_base 3: mod_base = OTHER; note = 2'-O-methyladenosine
  modified_base 4: mod_base = gm
  modified_base 5: mod_base = OTHER; note = 2'-O-methyladenosine
  modified_base 6: mod_base = um
  modified_base 7: mod_base = gm
  modified_base 8: mod_base = gm
  modified_base 9: mod_base = OTHER; note = 2'-fluorouridine
  modified_base 10: mod_base = OTHER; note = 2'-fluoroadenosine
  modified_base 11: mod_base = OTHER; note = 2'-fluorouridine
  modified_base 12: mod_base = um
  modified_base 13: mod_base = um
  modified_base 14: mod_base = cm
  modified_base 15: mod_base = um
  modified_base 16: mod_base = OTHER; note = 2'-O-methyladenosine
  modified_base 17: mod_base = cm
  modified_base 18: mod_base = um
  modified_base 19: mod_base = OTHER; note = 2'-O-methyladenosine
  modified_base 20: mod_base = cm
  modified_base 21: mod_base = OTHER; note = 2'-O-methyladenosine
  source 1..21: mol_type = other RNA
caagatggtatttctactaca

SEQ ID NO: 1002 - RNA, 21 nt, synthetic construct
  modified_base 1: mod_base = gm
  modified_base 2: mod_base = gm
  modified_base 3: mod_base = OTHER; note = 2'-O-methyladenosine
  modified_base 4: mod_base = cm
  modified_base 5: mod_base = OTHER; note = 2'-O-methyladenosine
  modified_base 6: mod_base = OTHER; note = 2'-O-methyladenosine
  modified_base 7: mod_base = gm
  modified_base 8: mod_base = gm
  modified_base 9: mod_base = OTHER; note = 2'-fluoroadenosine
  modified_base 10: mod_base = OTHER; note = 2'-fluoroadenosine
  modified_base 11: mod_base = OTHER; note = 2'-fluorocytidine
  modified_base 12: mod_base = um
  modified_base 13: mod_base = gm
  modified_base 14: mod_base = OTHER; note = 2'-O-methyladenosine
  modified_base 15: mod_base = um
  modified_base 16: mod_base = um
  modified_base 17: mod_base = OTHER; note = 2'-O-methyladenosine
  modified_base 18: mod_base = cm
  modified_base 19: mod_base = OTHER; note = 2'-O-methyladenosine
  modified_base 20: mod_base = OTHER; note = 2'-O-methyladenosine
  modified_base 21: mod_base = OTHER; note = 2'-O-methyladenosine
  source 1..21: mol_type = other RNA
ggacaaggaactgattacaaa

SEQ ID NO: 1003 - RNA, 21 nt, synthetic construct
  modified_base 1: mod_base = cm
  modified_base 2: mod_base = cm
  modified_base 3: mod_base = OTHER; note = 2'-O-methyladenosine
  modified_base 4: mod_base = cm
  modified_base 5: mod_base = um
  modified_base 6: mod_base = OTHER; note = 2'-O-methyladenosine
  modified_base 7: mod_base = OTHER; note = 2'-O-methyladenosine
  modified_base 8: mod_base = OTHER; note = 2'-O-methyladenosine
  modified_base 9: mod_base = OTHER; note = 2'-fluoroguanosine
  modified_base 10: mod_base = OTHER; note = 2'-fluorocytidine
  modified_base 11: mod_base = OTHER; note = 2'-fluoroadenosine
  modified_base 12: mod_base = um
  modified_base 13: mod_base = OTHER; note = 2'-O-methyladenosine
  modified_base 14: mod_base = cm
  modified_base 15: mod_base = OTHER; note = 2'-O-methyladenosine
  modified_base 16: mod_base = OTHER; note = 2'-O-methyladenosine
  modified_base 17: mod_base = um
  modified_base 18: mod_base = gm
  modified_base 19: mod_base = um
  modified_base 20: mod_base = OTHER; note = 2'-O-methyladenosine
  modified_base 21: mod_base = OTHER; note = 2'-O-methyladenosine
  source 1..21: mol_type = other RNA
ccactaaagcatacaatgtaa

SEQ ID NO: 1004 - RNA, 21 nt, synthetic construct
  modified_base 1: mod_base = gm
  modified_base 2: mod_base = um
  modified_base 3: mod_base = cm
  modified_base 4: mod_base = cm
  modified_base 5: mod_base = OTHER; note = 2'-O-methyladenosine
  modified_base 6: mod_base = OTHER; note = 2'-O-methyladenosine
  modified_base 7: mod_base = gm
  modified_base 8: mod_base = OTHER; note = 2'-O-methyladenosine
  modified_base 9: mod_base = OTHER; note = 2'-fluorouridine
  modified_base 10: mod_base = OTHER; note = 2'-fluoroguanosine
  modified_base 11: mod_base = OTHER; note = 2'-fluoroguanosine
  modified_base 12: mod_base = um
  modified_base 13: mod_base = OTHER; note = 2'-O-methyladenosine
  modified_base 14: mod_base = um
  modified_base 15: mod_base = um
  modified_base 16: mod_base = um
  modified_base 17: mod_base = cm
  modified_base 18: mod_base = um
  modified_base 19: mod_base = OTHER; note = 2'-O-methyladenosine
  modified_base 20: mod_base = cm
  modified_base 21: mod_base = um
  source 1..21: mol_type = other RNA
gtccaagatggtatttctact

SEQ ID NO: 1005 - RNA, 21 nt, synthetic construct
  modified_base 1: mod_base = gm
  modified_base 2: mod_base = gm
  modified_base 3: mod_base = OTHER; note = 2'-O-methyladenosine
  modified_base 4: mod_base = OTHER; note = 2'-O-methyladenosine
  modified_base 5: mod_base = gm
  modified_base 6: mod_base = um
  modified_base 7: mod_base = OTHER; note = 2'-O-methyladenosine
  modified_base 8: mod_base = gm
  modified_base 9: mod_base = OTHER; note = 2'-fluorouridine
  modified_base 10: mod_base = gm
  modified_base 11: mod_base = OTHER; note = 2'-fluoroguanosine
  modified_base 12: mod_base = OTHER; note = 2'-O-methyladenosine
  modified_base 13: mod_base = OTHER; note = 2'-fluoroadenosine
  modified_base 14: mod_base = OTHER; note = 2'-O-methyladenosine
  modified_base 15: mod_base = OTHER; note = 2'-O-methyladenosine
  modified_base 16: mod_base = um
  modified_base 17: mod_base = cm
  modified_base 18: mod_base = cm
  modified_base 19: mod_base = um
  modified_base 20: mod_base = OTHER; note = 2'-O-methyladenosine
  modified_base 21: mod_base = OTHER; note = 2'-O-methyladenosine
  source 1..21: mol_type = other RNA
ggaagtagtggaaaatcctaa

SEQ ID NO: 1006 - RNA, 21 nt, synthetic construct
  modified_base 1: mod_base = cm
  modified_base 2: mod_base = gm
  modified_base 3: mod_base = OTHER; note = 2'-O-methyladenosine
  modified_base 4: mod_base = OTHER; note = 2'-O-methyladenosine
  modified_base 5: mod_base = gm
  modified_base 6: mod_base = um
  modified_base 7: mod_base = OTHER; note = 2'-O-methyladenosine
  modified_base 8: mod_base = gm
  modified_base 9: mod_base = OTHER; note = 2'-fluorouridine
  modified_base 10: mod_base = gm
  modified_base 11: mod_base = OTHER; note = 2'-fluoroguanosine
  modified_base 12: mod_base = OTHER; note = 2'-O-methyladenosine
  modified_base 13: mod_base = OTHER; note = 2'-fluoroadenosine
  modified_base 14: mod_base = OTHER; note = 2'-O-methyladenosine
  modified_base 15: mod_base = OTHER; note = 2'-O-methyladenosine
  modified_base 16: mod_base = um
  modified_base 17: mod_base = cm
  modified_base 18: mod_base = cm
  modified_base 19: mod_base = um
  modified_base 20: mod_base = OTHER; note = 2'-O-methyladenosine
  modified_base 21: mod_base = OTHER; note = 2'-O-methyladenosine
  source 1..21: mol_type = other RNA
cgaagtagtggaaaatcctaa

SEQ ID NO: 1007 - RNA, 21 nt, synthetic construct
  modified_base 1: mod_base = cm
  modified_base 2: mod_base = OTHER; note = 2'-O-methyladenosine
  modified_base 3: mod_base = um
  modified_base 4: mod_base = OTHER; note = 2'-O-methyladenosine
  modified_base 5: mod_base = cm
  modified_base 6: mod_base = OTHER; note = 2'-O-methyladenosine
  modified_base 7: mod_base = OTHER; note = 2'-O-methyladenosine
  modified_base 8: mod_base = um
  modified_base 9: mod_base = OTHER; note = 2'-fluoroguanosine
  modified_base 10: mod_base = cm
  modified_base 11: mod_base = OTHER; note = 2'-fluorouridine
  modified_base 12: mod_base = OTHER; note = 2'-O-methyladenosine
  modified_base 13: mod_base = OTHER; note = 2'-fluoroguanosine
  modified_base 14: mod_base = um
  modified_base 15: mod_base = um
  modified_base 16: mod_base = OTHER; note = 2'-O-methyladenosine
  modified_base 17: mod_base = OTHER; note = 2'-O-methyladenosine
  modified_base 18: mod_base = OTHER; note = 2'-O-methyladenosine
  modified_base 19: mod_base = cm
  modified_base 20: mod_base = OTHER; note = 2'-O-methyladenosine
  modified_base 21: mod_base = OTHER; note = 2'-O-methyladenosine
  source 1..21: mol_type = other RNA
catacaatgctagttaaacaa

SEQ ID NO: 1008 - RNA, 21 nt, synthetic construct
  modified_base 1: mod_base = cm
  modified_base 2: mod_base = gm
  modified_base 3: mod_base = um
  modified_base 4: mod_base = OTHER; note = 2'-O-methyladenosine
  modified_base 5: mod_base = cm
  modified_base 6: mod_base = OTHER; note = 2'-O-methyladenosine
  modified_base 7: mod_base = OTHER; note = 2'-O-methyladenosine
  modified_base 8: mod_base = um
  modified_base 9: mod_base = OTHER; note = 2'-fluoroguanosine
  modified_base 10: mod_base = cm
  modified_base 11: mod_base = OTHER; note = 2'-fluorouridine
  modified_base 12: mod_base = OTHER; note = 2'-O-methyladenosine
  modified_base 13: mod_base = OTHER; note = 2'-fluoroguanosine
  modified_base 14: mod_base = um
  modified_base 15: mod_base = um
  modified_base 16: mod_base = OTHER; note = 2'-O-methyladenosine
  modified_base 17: mod_base = OTHER; note = 2'-O-methyladenosine
  modified_base 18: mod_base = OTHER; note = 2'-O-methyladenosine
  modified_base 19: mod_base = cm
  modified_base 20: mod_base = OTHER; note = 2'-O-methyladenosine
  modified_base 21: mod_base = OTHER; note = 2'-O-methyladenosine
  source 1..21: mol_type = other RNA
cgtacaatgctagttaaacaa

SEQ ID NO: 1009 - RNA, 21 nt, synthetic construct
  modified_base 1: mod_base = gm
  modified_base 2: mod_base = um
  modified_base 3: mod_base = cm
  modified_base 4: mod_base = cm
  modified_base 5: mod_base = OTHER; note = 2'-O-methyladenosine
  modified_base 6: mod_base = OTHER; note = 2'-O-methyladenosine
  modified_base 7: mod_base = gm
  modified_base 8: mod_base = OTHER; note = 2'-O-methyladenosine
  modified_base 9: mod_base = OTHER; note = 2'-fluorouridine
  modified_base 10: mod_base = gm
  modified_base 11: mod_base = OTHER; note = 2'-fluoroguanosine
  modified_base 12: mod_base = um
  modified_base 13: mod_base = OTHER; note = 2'-fluoroadenosine
  modified_base 14: mod_base = um
  modified_base 15: mod_base = um
  modified_base 16: mod_base = um
  modified_base 17: mod_base = cm
  modified_base 18: mod_base = um
  modified_base 19: mod_base = OTHER; note = 2'-O-methyladenosine
  modified_base 20: mod_base = cm
  modified_base 21: mod_base = um
  source 1..21: mol_type = other RNA
gtccaagatggtatttctact

SEQ ID NO: 1010 - RNA, 21 nt, synthetic construct
  modified_base 1: mod_base = gm
  modified_base 2: mod_base = um
  modified_base 3: mod_base = cm
  modified_base 4: mod_base = cm
  modified_base 5: mod_base = OTHER; note = 2'-O-methyladenosine
  modified_base 6: mod_base = OTHER; note = 2'-O-methyladenosine
  modified_base 7: mod_base = gm
  modified_base 8: mod_base = OTHER; note = 2'-O-methyladenosine
  modified_base 9: mod_base = OTHER; note = 2'-fluorouridine
  modified_base 10: mod_base = gm
  modified_base 11: mod_base = OTHER; note = 2'-fluoroguanosine
  modified_base 12: mod_base = um
  modified_base 13: mod_base = OTHER; note = 2'-fluoroadenosine
  modified_base 14: mod_base = um
  modified_base 15: mod_base = um
  modified_base 16: mod_base = um
  modified_base 17: mod_base = cm
  modified_base 18: mod_base = um
  modified_base 19: mod_base = OTHER; note = 2'-O-methyladenosine
  modified_base 20: mod_base = cm
  modified_base 21: mod_base = OTHER; note = 2'-O-methyladenosine
  source 1..21: mol_type = other RNA
gtccaagatggtatttctaca

SEQ ID NO: 1011 - RNA, 21 nt, synthetic construct
  modified_base 1: mod_base = gm
  modified_base 2: mod_base = gm
  modified_base 3: mod_base = OTHER; note = 2'-O-methyladenosine
  modified_base 4: mod_base = cm
  modified_base 5: mod_base = OTHER; note = 2'-O-methyladenosine
  modified_base 6: mod_base = OTHER; note = 2'-O-methyladenosine
  modified_base 7: mod_base = gm
  modified_base 8: mod_base = gm
  modified_base 9: mod_base = OTHER; note = 2'-fluoroadenosine
  modified_base 10: mod_base = OTHER; note = 2'-O-methyladenosine
  modified_base 11: mod_base = OTHER; note = 2'-fluorocytidine
  modified_base 12: mod_base = um
  modified_base 13: mod_base = OTHER; note = 2'-fluoroguanosine
  modified_base 14: mod_base = OTHER; note = 2'-O-methyladenosine
  modified_base 15: mod_base = um
  modified_base 16: mod_base = um
  modified_base 17: mod_base = OTHER; note = 2'-O-methyladenosine
  modified_base 18: mod_base = cm
  modified_base 19: mod_base = OTHER; note = 2'-O-methyladenosine
  modified_base 20: mod_base = OTHER; note = 2'-O-methyladenosine
  modified_base 21: mod_base = OTHER; note = 2'-O-methyladenosine
  source 1..21: mol_type = other RNA
ggacaaggaactgattacaaa

SEQ ID NO: 1012 - RNA, 21 nt, synthetic construct
  modified_base 1: mod_base = cm
  modified_base 2: mod_base = gm
  modified_base 3: mod_base = OTHER; note = 2'-O-methyladenosine
  modified_base 4: mod_base = cm
  modified_base 5: mod_base = OTHER; note = 2'-O-methyladenosine
  modified_base 6: mod_base = OTHER; note = 2'-O-methyladenosine
  modified_base 7: mod_base = gm
  modified_base 8: mod_base = gm
  modified_base 9: mod_base = OTHER; note = 2'-fluoroadenosine
  modified_base 10: mod_base = OTHER; note = 2'-O-methyladenosine
  modified_base 11: mod_base = OTHER; note = 2'-fluorocytidine
  modified_base 12: mod_base = um
  modified_base 13: mod_base = OTHER; note = 2'-fluoroguanosine
  modified_base 14: mod_base = OTHER; note = 2'-O-methyladenosine
  modified_base 15: mod_base = um
  modified_base 16: mod_base = um
  modified_base 17: mod_base = OTHER; note = 2'-O-methyladenosine
  modified_base 18: mod_base = cm
  modified_base 19: mod_base = OTHER; note = 2'-O-methyladenosine
  modified_base 20: mod_base = OTHER; note = 2'-O-methyladenosine
  modified_base 21: mod_base = OTHER; note = 2'-O-methyladenosine
  source 1..21: mol_type = other RNA
cgacaaggaactgattacaaa

SEQ ID NO: 1013 - RNA, 21 nt, synthetic construct
  modified_base 1: mod_base = cm
  modified_base 2: mod_base = OTHER; note = 2'-O-methyladenosine
  modified_base 3: mod_base = um
  modified_base 4: mod_base = OTHER; note = 2'-O-methyladenosine
  modified_base 5: mod_base = OTHER; note = 2'-O-methyladenosine
  modified_base 6: mod_base = um
  modified_base 7: mod_base = cm
  modified_base 8: mod_base = OTHER; note = 2'-O-methyladenosine
  modified_base 9: mod_base = OTHER; note = 2'-fluoroguanosine
  modified_base 10: mod_base = OTHER; note = 2'-fluoroguanosine
  modified_base 11: mod_base = OTHER; note = 2'-fluoroadenosine
  modified_base 12: mod_base = um
  modified_base 13: mod_base = gm
  modified_base 14: mod_base = um
  modified_base 15: mod_base = OTHER; note = 2'-O-methyladenosine
  modified_base 16: mod_base = OTHER; note = 2'-O-methyladenosine
  modified_base 17: mod_base = OTHER; note = 2'-O-methyladenosine
  modified_base 18: mod_base = cm
  modified_base 19: mod_base = um
  modified_base 20: mod_base = um
  modified_base 21: mod_base = OTHER; note = 2'-O-methyladenosine
  source 1..21: mol_type = other RNA
cataatcaggatgtaaactta

SEQ ID NO: 1014 - RNA, 21 nt, synthetic construct
  modified_base 1: mod_base = cm
  modified_base 2: mod_base = OTHER; note = 2'-O-methyladenosine
  modified_base 3: mod_base = um
  modified_base 4: mod_base = OTHER; note = 2'-O-methyladenosine
  modified_base 5: mod_base = OTHER; note = 2'-O-methyladenosine
  modified_base 6: mod_base = um
  modified_base 7: mod_base = cm
  modified_base 8: mod_base = OTHER; note = 2'-O-methyladenosine
  modified_base 9: mod_base = OTHER; note = 2'-fluoroguanosine
  modified_base 10: mod_base = gm
  modified_base 11: mod_base = OTHER; note = 2'-fluoroadenosine
  modified_base 12: mod_base = um
  modified_base 13: mod_base = OTHER; note = 2'-fluoroguanosine
  modified_base 14: mod_base = um
  modified_base 15: mod_base = OTHER; note = 2'-O-methyladenosine
  modified_base 16: mod_base = OTHER; note = 2'-O-methyladenosine
  modified_base 17: mod_base = OTHER; note = 2'-O-methyladenosine
  modified_base 18: mod_base = cm
  modified_base 19: mod_base = um
  modified_base 20: mod_base = um
  modified_base 21: mod_base = OTHER; note = 2'-O-methyladenosine
  source 1..21: mol_type = other RNA
cataatcaggatgtaaactta

SEQ ID NO: 1015 - RNA, 21 nt, synthetic construct
  modified_base 1: mod_base = cm
  modified_base 2: mod_base = gm
  modified_base 3: mod_base = um
  modified_base 4: mod_base = OTHER; note = 2'-O-methyladenosine
  modified_base 5: mod_base = OTHER; note = 2'-O-methyladenosine
  modified_base 6: mod_base = um
  modified_base 7: mod_base = cm
  modified_base 8: mod_base = OTHER; note = 2'-O-methyladenosine
  modified_base 9: mod_base = OTHER; note = 2'-fluoroguanosine
  modified_base 10: mod_base = gm
  modified_base 11: mod_base = OTHER; note = 2'-fluoroadenosine
  modified_base 12: mod_base = um
  modified_base 13: mod_base = OTHER; note = 2'-fluoroguanosine
  modified_base 14: mod_base = um
  modified_base 15: mod_base = OTHER; note = 2'-O-methyladenosine
  modified_base 16: mod_base = OTHER; note = 2'-O-methyladenosine
  modified_base 17: mod_base = OTHER; note = 2'-O-methyladenosine
  modified_base 18: mod_base = cm
  modified_base 19: mod_base = um
  modified_base 20: mod_base = um
  modified_base 21: mod_base = OTHER; note = 2'-O-methyladenosine
  source 1..21: mol_type = other RNA
cgtaatcaggatgtaaactta

SEQ ID NO: 1016 - RNA, 21 nt, synthetic construct
  modified_base 1: mod_base = gm
  modified_base 2: mod_base = gm
  modified_base 3: mod_base = OTHER; note = 2'-O-methyladenosine
  modified_base 4: mod_base = um
  modified_base 5: mod_base = gm
  modified_base 6: mod_base = um
  modified_base 7: mod_base = OTHER; note = 2'-O-methyladenosine
  modified_base 8: mod_base = OTHER; note = 2'-O-methyladenosine
  modified_base 9: mod_base = OTHER; note = 2'-fluoroadenosine
  modified_base 10: mod_base = OTHER; note = 2'-fluorocytidine
  modified_base 11: mod_base = OTHER; note = 2'-fluorouridine
  modified_base 12: mod_base = um
  modified_base 13: mod_base = OTHER; note = 2'-O-methyladenosine
  modified_base 14: mod_base = cm
  modified_base 15: mod_base = OTHER; note = 2'-O-methyladenosine
  modified_base 16: mod_base = um
  modified_base 17: mod_base = OTHER; note = 2'-O-methyladenosine
  modified_base 18: mod_base = gm
  modified_base 19: mod_base = cm
  modified_base 20: mod_base = um
  modified_base 21: mod_base = OTHER; note = 2'-O-methyladenosine
  source 1..21: mol_type = other RNA
ggatgtaaacttacatagcta

SEQ ID NO: 1017 - RNA, 21 nt, synthetic construct
  modified_base 1: mod_base = gm
  modified_base 2: mod_base = gm
  modified_base 3: mod_base = OTHER; note = 2'-O-methyladenosine
  modified_base 4: mod_base = um
  modified_base 5: mod_base = gm
  modified_base 6: mod_base = um
  modified_base 7: mod_base = OTHER; note = 2'-O-methyladenosine
  modified_base 8: mod_base = OTHER; note = 2'-O-methyladenosine
  modified_base 9: mod_base = OTHER; note = 2'-fluoroadenosine
  modified_base 10: mod_base = cm
  modified_base 11: mod_base = OTHER; note = 2'-fluorouridine
  modified_base 12: mod_base = um
  modified_base 13: mod_base = OTHER; note = 2'-fluoroadenosine
  modified_base 14: mod_base = cm
  modified_base 15: mod_base = OTHER; note = 2'-O-methyladenosine
  modified_base 16: mod_base = um
  modified_base 17: mod_base = OTHER; note = 2'-O-methyladenosine
  modified_base 18: mod_base = gm
  modified_base 19: mod_base = cm
  modified_base 20: mod_base = um
  modified_base 21: mod_base = OTHER; note = 2'-O-methyladenosine
  source 1..21: mol_type = other RNA
ggatgtaaacttacatagcta

SEQ ID NO: 1018 - RNA, 21 nt, synthetic construct
  modified_base 1: mod_base = gm
  modified_base 2: mod_base = cm
  modified_base 3: mod_base = OTHER; note = 2'-O-methyladenosine
  modified_base 4: mod_base = cm
  modified_base 5: mod_base = cm
  modified_base 6: mod_base = um
  modified_base 7: mod_base = um
  modified_base 8: mod_base = um
  modified_base 9: mod_base = OTHER; note = 2'-fluoroguanosine
  modified_base 10: mod_base = OTHER; note = 2'-O-methyladenosine
  modified_base 11: mod_base = OTHER; note = 2'-fluorocytidine
  modified_base 12: mod_base = OTHER; note = 2'-O-methyladenosine
  modified_base 13: mod_base = OTHER; note = 2'-fluoroadenosine
  modified_base 14: mod_base = um
  modified_base 15: mod_base = cm
  modified_base 16: mod_base = um
  modified_base 17: mod_base = um
  modified_base 18: mod_base = OTHER; note = 2'-O-methyladenosine
  modified_base 19: mod_base = OTHER; note = 2'-O-methyladenosine
  modified_base 20: mod_base = gm
  modified_base 21: mod_base = OTHER; note = 2'-O-methyladenosine
  source 1..21: mol_type = other RNA
gcacctttgacaatcttaaga

SEQ ID NO: 1019 - RNA, 21 nt, synthetic construct
  modified_base 1: mod_base = um
  modified_base 2: mod_base = gm
  modified_base 3: mod_base = cm
  modified_base 4: mod_base = um
  modified_base 5: mod_base = gm
  modified_base 6: mod_base = um
  modified_base 7: mod_base = gm
  modified_base 8: mod_base = gm
  modified_base 9: mod_base = OTHER; note = 2'-fluorouridine
  modified_base 10: mod_base = OTHER; note = 2'-fluorouridine
  modified_base 11: mod_base = OTHER; note = 2'-fluoroadenosine
  modified_base 12: mod_base = um
  modified_base 13: mod_base = OTHER; note = 2'-O-methyladenosine
  modified_base 14: mod_base = cm
  modified_base 15: mod_base = cm
  modified_base 16: mod_base = um
  modified_base 17: mod_base = OTHER; note = 2'-O-methyladenosine
  modified_base 18: mod_base = cm
  modified_base 19: mod_base = um
  modified_base 20: mod_base = OTHER; note = 2'-O-methyladenosine
  modified_base 21: mod_base = OTHER; note = 2'-O-methyladenosine
  source 1..21: mol_type = other RNA
tgctgtggttatacctactaa

SEQ ID NO: 1020 - RNA, 21 nt, synthetic construct
  modified_base 1: mod_base = gm
  modified_base 2: mod_base = OTHER; note = 2'-O-methyladenosine
  modified_base 3: mod_base = cm
  modified_base 4: mod_base = OTHER; note = 2'-O-methyladenosine
  modified_base 5: mod_base = OTHER; note = 2'-O-methyladenosine
  modified_base 6: mod_base = um
  modified_base 7: mod_base = cm
  modified_base 8: mod_base = um
  modified_base 9: mod_base = OTHER; note = 2'-fluorouridine
  modified_base 10: mod_base = OTHER; note = 2'-fluoroadenosine
  modified_base 11: mod_base = OTHER; note = 2'-fluoroadenosine
  modified_base 12: mod_base = gm
  modified_base 13: mod_base = OTHER; note = 2'-O-methyladenosine
  modified_base 14: mod_base = cm
  modified_base 15: mod_base = OTHER; note = 2'-O-methyladenosine
  modified_base 16: mod_base = cm
  modified_base 17: mod_base = um
  modified_base 18: mod_base = um
  modified_base 19: mod_base = cm
  modified_base 20: mod_base = um
  modified_base 21: mod_base = um
  source 1..21: mol_type = other RNA
gacaatcttaagacacttctt

SEQ ID NO: 1021 - RNA, 21 nt, synthetic construct
  modified_base 1: mod_base = cm
  modified_base 2: mod_base = OTHER; note = 2'-O-methyladenosine
  modified_base 3: mod_base = um
  modified_base 4: mod_base = gm
  modified_base 5: mod_base = gm
  modified_base 6: mod_base = gm
  modified_base 7: mod_base = cm
  modified_base 8: mod_base = OTHER; note = 2'-O-methyladenosine
  modified_base 9: mod_base = OTHER; note = 2'-fluorocytidine
  modified_base 10: mod_base = OTHER; note = 2'-fluoroadenosine
  modified_base 11: mod_base = OTHER; note = 2'-fluorocytidine
  modified_base 12: mod_base = um
  modified_base 13: mod_base = um
  modified_base 14: mod_base = um
  modified_base 15: mod_base = cm
  modified_base 16: mod_base = um
  modified_base 17: mod_base = um
  modified_base 18: mod_base = OTHER; note = 2'-O-methyladenosine
  modified_base 19: mod_base = um
  modified_base 20: mod_base = gm
  modified_base 21: mod_base = OTHER; note = 2'-O-methyladenosine
  source 1..21: mol_type = other RNA
catgggcacactttcttatga

SEQ ID NO: 1022 - RNA, 21 nt, synthetic construct
  modified_base 1: mod_base = OTHER; note = 2'-O-methyladenosine
  modified_base 2: mod_base = cm
  modified_base 3: mod_base = OTHER; note = 2'-O-methyladenosine
  modified_base 4: mod_base = gm
  modified_base 5: mod_base = OTHER; note = 2'-O-methyladenosine
  modified_base 6: mod_base = OTHER; note = 2'-O-methyladenosine
  modified_base 7: mod_base = OTHER; note = 2'-O-methyladenosine
  modified_base 8: mod_base = um
  modified_base 9: mod_base = OTHER; note = 2'-fluorouridine
  modified_base 10: mod_base = OTHER; note = 2'-fluoroguanosine
  modified_base 11: mod_base = OTHER; note = 2'-fluoroadenosine
  modified_base 12: mod_base = cm
  modified_base 13: mod_base = cm
  modified_base 14: mod_base = cm
  modified_base 15: mod_base = um
  modified_base 16: mod_base = OTHER; note = 2'-O-methyladenosine
  modified_base 17: mod_base = OTHER; note = 2'-O-methyladenosine
  modified_base 18: mod_base = gm
  modified_base 19: mod_base = um
  modified_base 20: mod_base = um
  modified_base 21: mod_base = OTHER; note = 2'-O-methyladenosine
  source 1..21: mol_type = other RNA
acagaaattgaccctaagtta

SEQ ID NO: 1023 - RNA, 21 nt, synthetic construct
  modified_base 1: mod_base = gm
  modified_base 2: mod_base = OTHER; note = 2'-O-methyladenosine
  modified_base 3: mod_base = um
  modified_base 4: mod_base = gm
  modified_base 5: mod_base = cm
  modified_base 6: mod_base = um
  modified_base 7: mod_base = um
  modified_base 8: mod_base = OTHER; note = 2'-O-methyladenosine
  modified_base 9: mod_base = OTHER; note = 2'-fluorocytidine
  modified_base 10: mod_base = OTHER; note = 2'-fluoroguanosine
  modified_base 11: mod_base = OTHER; note = 2'-fluorouridine
  modified_base 12: mod_base = um
  modified_base 13: mod_base = OTHER; note = 2'-O-methyladenosine
  modified_base 14: mod_base = OTHER; note = 2'-O-methyladenosine
  modified_base 15: mod_base = um
  modified_base 16: mod_base = OTHER; note = 2'-O-methyladenosine
  modified_base 17: mod_base = cm
  modified_base 18: mod_base = gm
  modified_base 19: mod_base = um
  modified_base 20: mod_base = um
  modified_base 21: mod_base = um
  source 1..21: mol_type = other RNA
gatgcttacgttaatacgttt

SEQ ID NO: 1024 - RNA, 21 nt, synthetic construct
  modified_base 1: mod_base = cm
  modified_base 2: mod_base = OTHER; note = 2'-O-methyladenosine
  modified_base 3: mod_base = OTHER; note = 2'-O-methyladenosine
  modified_base 4: mod_base = gm
  modified_base 5: mod_base = cm
  modified_base 6: mod_base = um
  modified_base 7: mod_base = OTHER; note = 2'-O-methyladenosine
  modified_base 8: mod_base = um
  modified_base 9: mod_base = OTHER; note = 2'-fluoroguanosine
  modified_base 10: mod_base = OTHER; note = 2'-fluoroadenosine
  modified_base 11: mod_base = OTHER; note = 2'-fluorocytidine
  modified_base 12: mod_base = cm
  modified_base 13: mod_base = cm
  modified_base 14: mod_base = OTHER; note = 2'-O-methyladenosine
  modified_base 15: mod_base = OTHER; note = 2'-O-methyladenosine
  modified_base 16: mod_base = OTHER; note = 2'-O-methyladenosine
  modified_base 17: mod_base = um
  modified_base 18: mod_base = gm
  modified_base 19: mod_base = um
  modified_base 20: mod_base = OTHER; note = 2'-O-methyladenosine
  modified_base 21: mod_base = um
  source 1..21: mol_type = other RNA
caagctatgacccaaatgtat

SEQ ID NO: 1025 - RNA, 21 nt, synthetic construct
  modified_base 1: mod_base = um
  modified_base 2: mod_base = gm
  modified_base 3: mod_base = um
  modified_base 4: mod_base = cm
  modified_base 5: mod_base = gm
  modified_base 6: mod_base = OTHER; note = 2'-O-methyladenosine
  modified_base 7: mod_base = um
  modified_base 8: mod_base = um
  modified_base 9: mod_base = OTHER; note = 2'-fluorocytidine
  modified_base 10: mod_base = OTHER; note = 2'-fluoroadenosine
  modified_base 11: mod_base = OTHER; note = 2'-fluoroguanosine
  modified_base 12: mod_base = OTHER; note = 2'-O-methyladenosine
  modified_base 13: mod_base = um
  modified_base 14: mod_base = cm
  modified_base 15: mod_base = um
  modified_base 16: mod_base = um
  modified_base 17: mod_base = OTHER; note = 2'-O-methyladenosine
  modified_base 18: mod_base = OTHER; note = 2'-O-methyladenosine
  modified_base 19: mod_base = um
  modified_base 20: mod_base = gm
  modified_base 21: mod_base = OTHER; note = 2'-O-methyladenosine
  source 1..21: mol_type = other RNA
tgtcgattcagatcttaatga

SEQ ID NO: 1026 - RNA, 21 nt, synthetic construct
  modified_base 1: mod_base = gm
  modified_base 2: mod_base = cm
  modified_base 3: mod_base = um
  modified_base 4: mod_base = um
  modified_base 5: mod_base = gm
  modified_base 6: mod_base = cm
  modified_base 7: mod_base = um
  modified_base 8: mod_base = um
  modified_base 9: mod_base = OTHER; note = 2'-fluorouridine
  modified_base 10: mod_base = OTHER; note = 2'-fluorocytidine
  modified_base 11: mod_base = OTHER; note = 2'-fluoroguanosine
  modified_base 12: mod_base = um
  modified_base 13: mod_base = gm
  modified_base 14: mod_base = gm
  modified_base 15: mod_base = um
  modified_base 16: mod_base = OTHER; note = 2'-O-methyladenosine
  modified_base 17: mod_base = um
  modified_base 18: mod_base = um
  modified_base 19: mod_base = cm
  modified_base 20: mod_base = um
  modified_base 21: mod_base = um
  source 1..21: mol_type = other RNA
gcttgctttcgtggtattctt

SEQ ID NO: 1027 - RNA, 21 nt, synthetic construct
  modified_base 1: mod_base = OTHER; note = 2'-O-methyladenosine
  modified_base 2: mod_base = gm
  modified_base 3: mod_base = OTHER; note = 2'-O-methyladenosine
  modified_base 4: mod_base = cm
  modified_base 5: mod_base = OTHER; note = 2'-O-methyladenosine
  modified_base 6: mod_base = OTHER; note = 2'-O-methyladenosine
  modified_base 7: mod_base = gm
  modified_base 8: mod_base = gm
  modified_base 9: mod_base = OTHER; note = 2'-fluoroadenosine
  modified_base 10: mod_base = OTHER; note = 2'-O-methyladenosine
  modified_base 11: mod_base = OTHER; note = 2'-fluorocytidine
  modified_base 12: mod_base = um
  modified_base 13: mod_base = OTHER; note = 2'-fluoroguanosine
  modified_base 14: mod_base = OTHER; note = 2'-O-methyladenosine
  modified_base 15: mod_base = um
  modified_base 16: mod_base = um
  modified_base 17: mod_base = OTHER; note = 2'-O-methyladenosine
  modified_base 18: mod_base = cm
  modified_base 19: mod_base = OTHER; note = 2'-O-methyladenosine
  modified_base 20: mod_base = OTHER; note = 2'-O-methyladenosine
  modified_base 21: mod_base = OTHER; note = 2'-O-methyladenosine
  source 1..21: mol_type = other RNA
agacaaggaactgattacaaa

SEQ ID NO: 1028 - RNA, 21 nt, synthetic construct
  modified_base 1: mod_base = cm
  modified_base 2: mod_base = gm
  modified_base 3: mod_base = um
  modified_base 4: mod_base = OTHER; note = 2'-O-methyladenosine
  modified_base 5: mod_base = OTHER; note = 2'-O-methyladenosine
  modified_base 6: mod_base = um
  modified_base 7: mod_base = cm
  modified_base 8: mod_base = OTHER; note = 2'-O-methyladenosine
  modified_base 9: mod_base = OTHER; note = 2'-fluoroguanosine
  modified_base 10: mod_base = OTHER; note = 2'-fluoroguanosine
  modified_base 11: mod_base = OTHER; note = 2'-fluoroadenosine
  modified_base 12: mod_base = um
  modified_base 13: mod_base = gm
  modified_base 14: mod_base = um
  modified_base 15: mod_base = OTHER; note = 2'-O-methyladenosine
  modified_base 16: mod_base = OTHER; note = 2'-O-methyladenosine
  modified_base 17: mod_base = OTHER; note = 2'-O-methyladenosine
  modified_base 18: mod_base = cm
  modified_base 19: mod_base = um
  modified_base 20: mod_base = um
  modified_base 21: mod_base = OTHER; note = 2'-O-methyladenosine
  source 1..21: mol_type = other RNA
cgtaatcaggatgtaaactta

SEQ ID NO: 1029 - RNA, 21 nt, synthetic construct
  modified_base 1: mod_base = cm
  modified_base 1^2: mod_base = OTHER; note = phosphorothioate linkage
  modified_base 2: mod_base = gm
  modified_base 3: mod_base = OTHER; note = 2'-O-methyladenosine
  modified_base 4: mod_base = OTHER; note = 2'-O-methyladenosine
  modified_base 5: mod_base = gm
  modified_base 6: mod_base = um
  modified_base 7: mod_base = OTHER; note = 2'-O-methyladenosine
  modified_base 8: mod_base = gm
  modified_base 9: mod_base = OTHER; note = 2'-fluorouridine
  modified_base 10: mod_base = gm
  modified_base 11: mod_base = OTHER; note = 2'-fluoroguanosine
  modified_base 12: mod_base = OTHER; note = 2'-O-methyladenosine
  modified_base 13: mod_base = OTHER; note = 2'-fluoroadenosine
  modified_base 14: mod_base = OTHER; note = 2'-O-methyladenosine
  modified_base 15: mod_base = OTHER; note = 2'-O-methyladenosine
  modified_base 16: mod_base = um
  modified_base 17: mod_base = cm
  modified_base 18: mod_base = cm
  modified_base 19: mod_base = um
  modified_base 20: mod_base = OTHER; note = 2'-O-methyladenosine
  modified_base 21: mod_base = OTHER; note = 2'-O-methyladenosine
  source 1..21: mol_type = other RNA
cgaagtagtggaaaatcctaa

SEQ ID NO: 1030 - RNA, 21 nt, synthetic construct
  modified_base 1: mod_base = gm
  modified_base 1^2: mod_base = OTHER; note = phosphorothioate linkage
  modified_base 2: mod_base = gm
  modified_base 3: mod_base = OTHER; note = 2'-O-methyladenosine
  modified_base 4: mod_base = cm
  modified_base 5: mod_base = OTHER; note = 2'-O-methyladenosine
  modified_base 6: mod_base = OTHER; note = 2'-O-methyladenosine
  modified_base 7: mod_base = gm
  modified_base 8: mod_base = gm
  modified_base 9: mod_base = OTHER; note = 2'-fluoroadenosine
  modified_base 10: mod_base = OTHER; note = 2'-O-methyladenosine
  modified_base 11: mod_base = OTHER; note = 2'-fluorocytidine
  modified_base 12: mod_base = um
  modified_base 13: mod_base = OTHER; note = 2'-fluoroguanosine
  modified_base 14: mod_base = OTHER; note = 2'-O-methyladenosine
  modified_base 15: mod_base = um
  modified_base 16: mod_base = um
  modified_base 17: mod_base = OTHER; note = 2'-O-methyladenosine
  modified_base 18: mod_base = cm
  modified_base 19: mod_base = OTHER; note = 2'-O-methyladenosine
  modified_base 20: mod_base = OTHER; note = 2'-O-methyladenosine
  modified_base 21: mod_base = OTHER; note = 2'-O-methyladenosine
  source 1..21: mol_type = other RNA
ggacaaggaactgattacaaa

SEQ ID NO: 1031 - RNA, 21 nt, synthetic construct
  modified_base 1: mod_base = um
  modified_base 1^2: mod_base = OTHER; note = phosphorothioate linkage
  modified_base 2: mod_base = gm
  modified_base 3: mod_base = cm
  modified_base 4: mod_base = um
  modified_base 5: mod_base = gm
  modified_base 6: mod_base = um
  modified_base 7: mod_base = gm
  modified_base 8: mod_base = gm
  modified_base 9: mod_base = OTHER; note = 2'-fluorouridine
  modified_base 10: mod_base = OTHER; note = 2'-fluorouridine
  modified_base 11: mod_base = OTHER; note = 2'-fluoroadenosine
  modified_base 12: mod_base = um
  modified_base 13: mod_base = OTHER; note = 2'-O-methyladenosine
  modified_base 14: mod_base = cm
  modified_base 15: mod_base = cm
  modified_base 16: mod_base = um
  modified_base 17: mod_base = OTHER; note = 2'-O-methyladenosine
  modified_base 18: mod_base = cm
  modified_base 19: mod_base = um
  modified_base 20: mod_base = OTHER; note = 2'-O-methyladenosine
  modified_base 21: mod_base = OTHER; note = 2'-O-methyladenosine
  source 1..21: mol_type = other RNA
tgctgtggttatacctactaa

SEQ ID NO: 1032 - RNA, 21 nt, synthetic construct
  modified_base 1: mod_base = cm
  modified_base 1^2: mod_base = OTHER; note = phosphorothioate linkage
  modified_base 2: mod_base = OTHER; note = 2'-O-methyladenosine
  modified_base 3: mod_base = um
  modified_base 4: mod_base = OTHER; note = 2'-O-methyladenosine
  modified_base 5: mod_base = cm
  modified_base 6: mod_base = OTHER; note = 2'-O-methyladenosine
  modified_base 7: mod_base = OTHER; note = 2'-O-methyladenosine
  modified_base 8: mod_base = um
  modified_base 9: mod_base = OTHER; note = 2'-fluoroguanosine
  modified_base 10: mod_base = cm
  modified_base 11: mod_base = OTHER; note = 2'-fluorouridine
  modified_base 12: mod_base = OTHER; note = 2'-O-methyladenosine
  modified_base 13: mod_base = OTHER; note = 2'-fluoroguanosine
  modified_base 14: mod_base = um
  modified_base 15: mod_base = um
  modified_base 16: mod_base = OTHER; note = 2'-O-methyladenosine
  modified_base 17: mod_base = OTHER; note = 2'-O-methyladenosine
  modified_base 18: mod_base = OTHER; note = 2'-O-methyladenosine
  modified_base 19: mod_base = cm
  modified_base 20: mod_base = OTHER; note = 2'-O-methyladenosine
  modified_base 21: mod_base = OTHER; note = 2'-O-methyladenosine
  source 1..21: mol_type = other RNA
catacaatgctagttaaacaa

SEQ ID NO: 1033 - RNA, 21 nt, synthetic construct
  modified_base 1: mod_base = cm
  modified_base 1^2: mod_base = OTHER; note = phosphorothioate linkage
  modified_base 2: mod_base = gm
  modified_base 3: mod_base = um
  modified_base 4: mod_base = OTHER; note = 2'-O-methyladenosine
  modified_base 5: mod_base = OTHER; note = 2'-O-methyladenosine
  modified_base 6: mod_base = um
  modified_base 7: mod_base = cm
  modified_base 8: mod_base = OTHER; note = 2'-O-methyladenosine
  modified_base 9: mod_base = OTHER; note = 2'-fluoroguanosine
  modified_base 10: mod_base = gm
  modified_base 11: mod_base = OTHER; note = 2'-fluoroadenosine
  modified_base 12: mod_base = um
  modified_base 13: mod_base = OTHER; note = 2'-fluoroguanosine
  modified_base 14: mod_base = um
  modified_base 15: mod_base = OTHER; note = 2'-O-methyladenosine
  modified_base 16: mod_base = OTHER; note = 2'-O-methyladenosine
  modified_base 17: mod_base = OTHER; note = 2'-O-methyladenosine
  modified_base 18: mod_base = cm
  modified_base 19: mod_base = um
  modified_base 20: mod_base = um
  modified_base 21: mod_base = OTHER; note = 2'-O-methyladenosine
  source 1..21: mol_type = other RNA
cgtaatcaggatgtaaactta

SEQ ID NO: 1034 - RNA, 21 nt, synthetic construct
  modified_base 1: mod_base = gm
  modified_base 1^2: mod_base = OTHER; note = phosphorothioate linkage
  modified_base 2: mod_base = cm
  modified_base 3: mod_base = um
  modified_base 4: mod_base = um
  modified_base 5: mod_base = cm
  modified_base 6: mod_base = um
  modified_base 7: mod_base = um
  modified_base 8: mod_base = OTHER; note = 2'-O-methyladenosine
  modified_base 9: mod_base = OTHER; note = 2'-fluoroadenosine
  modified_base 10: mod_base = OTHER; note = 2'-fluoroguanosine
  modified_base 11: mod_base = OTHER; note = 2'-fluoroadenosine
  modified_base 12: mod_base = gm
  modified_base 13: mod_base = um
  modified_base 14: mod_base = gm
  modified_base 15: mod_base = cm
  modified_base 16: mod_base = um
  modified_base 17: mod_base = um
  modified_base 18: mod_base = OTHER; note = 2'-O-methyladenosine
  modified_base 19: mod_base = um
  modified_base 20: mod_base = gm
  modified_base 21: mod_base = OTHER; note = 2'-O-methyladenosine
  source 1..21: mol_type = other RNA
gcttcttaagagtgcttatga

SEQ ID NO: 1035 - RNA, 21 nt, synthetic construct
  modified_base 1: mod_base = cm
  modified_base 1^2: mod_base = OTHER; note = phosphorothioate linkage
  modified_base 2: mod_base = um
  modified_base 3: mod_base = um
  modified_base 4: mod_base = OTHER; note = 2'-O-methyladenosine
  modified_base 5: mod_base = gm
  modified_base 6: mod_base = OTHER; note = 2'-O-methyladenosine
  modified_base 7: mod_base = cm
  modified_base 8: mod_base = OTHER; note = 2'-O-methyladenosine
  modified_base 9: mod_base = OTHER; note = 2'-fluoroadenosine
  modified_base 10: mod_base = OTHER; note = 2'-fluorouridine
  modified_base 11: mod_base = OTHER; note = 2'-fluoroguanosine
  modified_base 12: mod_base = um
  modified_base 13: mod_base = cm
  modified_base 14: mod_base = um
  modified_base 15: mod_base = um
  modified_base 16: mod_base = OTHER; note = 2'-O-methyladenosine
  modified_base 17: mod_base = um
  modified_base 18: mod_base = cm
  modified_base 19: mod_base = um
  modified_base 20: mod_base = OTHER; note = 2'-O-methyladenosine
  modified_base 21: mod_base = OTHER; note = 2'-O-methyladenosine
  source 1..21: mol_type = other RNA
cttagacaatgtcttatctaa

SEQ ID NO: 1036 - RNA, 21 nt, synthetic construct
  modified_base 1: mod_base = gm
  modified_base 1^2: mod_base = OTHER; note = phosphorothioate linkage
  modified_base 2: mod_base = cm
  modified_base 3: mod_base = OTHER; note = 2'-O-methyladenosine
  modified_base 4: mod_base = um
  modified_base 5: mod_base = um
  modified_base 6: mod_base = OTHER; note = 2'-O-methyladenosine
  modified_base 7: mod_base = OTHER; note = 2'-O-methyladenosine
  modified_base 8: mod_base = um
  modified_base 9: mod_base = OTHER; note = 2'-fluoroguanosine
  modified_base 10: mod_base = OTHER; note = 2'-fluoroguanosine
  modified_base 11: mod_base = OTHER; note = 2'-fluorocytidine
  modified_base 12: mod_base = OTHER; note = 2'-O-methyladenosine
  modified_base 13: mod_base = OTHER; note = 2'-O-methyladenosine
  modified_base 14: mod_base = um
  modified_base 15: mod_base = cm
  modified_base 16: mod_base = um
  modified_base 17: mod_base = um
  modified_base 18: mod_base = cm
  modified_base 19: mod_base = OTHER; note = 2'-O-methyladenosine
  modified_base 20: mod_base = um
  modified_base 21: mod_base = OTHER; note = 2'-O-methyladenosine
  source 1..21: mol_type = other RNA
gcattaatggcaatcttcata

SEQ ID NO: 1037 - RNA, 21 nt, synthetic construct
  modified_base 1: mod_base = gm
  modified_base 1^2: mod_base = OTHER; note = phosphorothioate linkage
  modified_base 2: mod_base = OTHER; note = 2'-O-methyladenosine
  modified_base 3: mod_base = um
  modified_base 4: mod_base = gm
  modified_base 5: mod_base = cm
  modified_base 6: mod_base = um
  modified_base 7: mod_base = um
  modified_base 8: mod_base = OTHER; note = 2'-O-methyladenosine
  modified_base 9: mod_base = OTHER; note = 2'-fluorocytidine
  modified_base 10: mod_base = OTHER; note = 2'-fluoroguanosine
  modified_base 11: mod_base = OTHER; note = 2'-fluorouridine
  modified_base 12: mod_base = um
  modified_base 13: mod_base = OTHER; note = 2'-O-methyladenosine
  modified_base 14: mod_base = OTHER; note = 2'-O-methyladenosine
  modified_base 15: mod_base = um
  modified_base 16: mod_base = OTHER; note = 2'-O-methyladenosine
  modified_base 17: mod_base = cm
  modified_base 18: mod_base = gm
  modified_base 19: mod_base = um
  modified_base 20: mod_base = um
  modified_base 21: mod_base = um
  source 1..21: mol_type = other RNA
gatgcttacgttaatacgttt

SEQ ID NO: 1038 - RNA, 21 nt, synthetic construct
  modified_base 1: mod_base = gm
  modified_base 1^2: mod_base = OTHER; note = phosphorothioate linkage
  modified_base 2: mod_base = cm
  modified_base 3: mod_base = OTHER; note = 2'-O-methyladenosine
  modified_base 4: mod_base = cm
  modified_base 5: mod_base = cm
  modified_base 6: mod_base = um
  modified_base 7: mod_base = um
  modified_base 8: mod_base = um
  modified_base 9: mod_base = OTHER; note = 2'-fluoroguanosine
  modified_base 10: mod_base = OTHER; note = 2'-fluoroadenosine
  modified_base 11: mod_base = OTHER; note = 2'-fluorocytidine
  modified_base 12: mod_base = OTHER; note = 2'-O-methyladenosine
  modified_base 13: mod_base = OTHER; note = 2'-O-methyladenosine
  modified_base 14: mod_base = um
  modified_base 15: mod_base = cm
  modified_base 16: mod_base = um
  modified_base 17: mod_base = um
  modified_base 18: mod_base = OTHER; note = 2'-O-methyladenosine
  modified_base 19: mod_base = OTHER; note = 2'-O-methyladenosine
  modified_base 20: mod_base = gm
  modified_base 21: mod_base = OTHER; note = 2'-O-methyladenosine
  source 1..21: mol_type = other RNA
gcacctttgacaatcttaaga

SEQ ID NO: 1039 - RNA, 21 nt, synthetic construct
  modified_base 1: mod_base = gm
  modified_base 1^2: mod_base = OTHER; note = phosphorothioate linkage
  modified_base 2: mod_base = gm
  modified_base 3: mod_base = OTHER; note = 2'-O-methyladenosine
  modified_base 4: mod_base = OTHER; note = 2'-O-methyladenosine
  modified_base 5: mod_base = gm
  modified_base 6: mod_base = um
  modified_base 7: mod_base = OTHER; note = 2'-O-methyladenosine
  modified_base 8: mod_base = gm
  modified_base 9: mod_base = OTHER; note = 2'-fluorouridine
  modified_base 10: mod_base = OTHER; note = 2'-fluoroguanosine
  modified_base 11: mod_base = OTHER; note = 2'-fluoroguanosine
  modified_base 12: mod_base = OTHER; note = 2'-O-methyladenosine
  modified_base 13: mod_base = OTHER; note = 2'-O-methyladenosine
  modified_base 14: mod_base = OTHER; note = 2'-O-methyladenosine
  modified_base 15: mod_base = OTHER; note = 2'-O-methyladenosine
  modified_base 16: mod_base = um
  modified_base 17: mod_base = cm
  modified_base 18: mod_base = cm
  modified_base 19: mod_base = um
  modified_base 20: mod_base = OTHER; note = 2'-O-methyladenosine
  modified_base 21: mod_base = OTHER; note = 2'-O-methyladenosine
  source 1..21: mol_type = other RNA
ggaagtagtggaaaatcctaa

SEQ ID NO: 1040 - RNA, 21 nt, synthetic construct
  modified_base 1: mod_base = cm
  modified_base 1^2: mod_base = OTHER; note = phosphorothioate linkage
  modified_base 2: mod_base = cm
  modified_base 3: mod_base = um
  modified_base 4: mod_base = um
  modified_base 5: mod_base = um
  modified_base 6: mod_base = um
  modified_base 7: mod_base = gm
  modified_base 8: mod_base = OTHER; note = 2'-O-methyladenosine
  modified_base 9: mod_base = OTHER; note = 2'-fluorouridine
  modified_base 10: mod_base = OTHER; note = 2'-fluoroguanosine
  modified_base 11: mod_base = OTHER; note = 2'-fluorouridine
  modified_base 12: mod_base = um
  modified_base 13: mod_base = gm
  modified_base 14: mod_base = um
  modified_base 15: mod_base = um
  modified_base 16: mod_base = OTHER; note = 2'-O-methyladenosine
  modified_base 17: mod_base = gm
  modified_base 18: mod_base = OTHER; note = 2'-O-methyladenosine
  modified_base 19: mod_base = cm
  modified_base 20: mod_base = OTHER; note = 2'-O-methyladenosine
  modified_base 21: mod_base = OTHER; note = 2'-O-methyladenosine
  source 1..21: mol_type = other RNA
ccttttgatgttgttagacaa

SEQ ID NO: 1041 - RNA, 21 nt, synthetic construct
  modified_base 1: mod_base = um
  modified_base 1^2: mod_base = OTHER; note = phosphorothioate linkage
  modified_base 2: mod_base = gm
  modified_base 3: mod_base = gm
  modified_base 4: mod_base = um
  modified_base 5: mod_base = OTHER; note = 2'-O-methyladenosine
  modified_base 6: mod_base = OTHER; note = 2'-O-methyladenosine
  modified_base 7: mod_base = um
  modified_base 8: mod_base = gm
  modified_base 9: mod_base = OTHER; note = 2'-fluorocytidine
  modified_base 10: mod_base = OTHER; note = 2'-fluorouridine
  modified_base 11: mod_base = OTHER; note = 2'-fluorouridine
  modified_base 12: mod_base = um
  modified_base 13: mod_base = OTHER; note = 2'-O-methyladenosine
  modified_base 14: mod_base = gm
  modified_base 15: mod_base = OTHER; note = 2'-O-methyladenosine
  modified_base 16: mod_base = um
  modified_base 17: mod_base = cm
  modified_base 18: mod_base = OTHER; note = 2'-O-methyladenosine
  modified_base 19: mod_base = OTHER; note = 2'-O-methyladenosine
  modified_base 20: mod_base = gm
  modified_base 21: mod_base = OTHER; note = 2'-O-methyladenosine
  source 1..21: mol_type = other RNA
tggtaatgctttagatcaaga

SEQ ID NO: 1042 - RNA, 21 nt, synthetic construct
  modified_base 1: mod_base = cm
  modified_base 1^2: mod_base = OTHER; note = phosphorothioate linkage
  modified_base 2: mod_base = OTHER; note = 2'-O-methyladenosine
  modified_base 3: mod_base = OTHER; note = 2'-O-methyladenosine
  modified_base 4: mod_base = gm
  modified_base 5: mod_base = cm
  modified_base 6: mod_base = um
  modified_base 7: mod_base = OTHER; note = 2'-O-methyladenosine
  modified_base 8: mod_base = um
  modified_base 9: mod_base = OTHER; note = 2'-fluoroguanosine
  modified_base 10: mod_base = OTHER; note = 2'-fluoroadenosine
  modified_base 11: mod_base = OTHER; note = 2'-fluorocytidine
  modified_base 12: mod_base = cm
  modified_base 13: mod_base = cm
  modified_base 14: mod_base = OTHER; note = 2'-O-methyladenosine
  modified_base 15: mod_base = OTHER; note = 2'-O-methyladenosine
  modified_base 16: mod_base = OTHER; note = 2'-O-methyladenosine
  modified_base 17: mod_base = um
  modified_base 18: mod_base = gm
  modified_base 19: mod_base = um
  modified_base 20: mod_base = OTHER; note = 2'-O-methyladenosine
  modified_base 21: mod_base = um
  source 1..21: mol_type = other RNA
caagctatgacccaaatgtat

SEQ ID NO: 1043 - RNA, 21 nt, synthetic construct
  modified_base 1: mod_base = gm
  modified_base 1^2: mod_base = OTHER; note = phosphorothioate linkage
  modified_base 2: mod_base = um
  modified_base 3: mod_base = cm
  modified_base 4: mod_base = cm
  modified_base 5: mod_base = OTHER; note = 2'-O-methyladenosine
  modified_base 6: mod_base = OTHER; note = 2'-O-methyladenosine
  modified_base 7: mod_base = gm
  modified_base 8: mod_base = OTHER; note = 2'-O-methyladenosine
  modified_base 9: mod_base = OTHER; note = 2'-fluorouridine
  modified_base 10: mod_base = OTHER; note = 2'-fluoroguanosine
  modified_base 11: mod_base = OTHER; note = 2'-fluoroguanosine
  modified_base 12: mod_base = um
  modified_base 13: mod_base = OTHER; note = 2'-O-methyladenosine
  modified_base 14: mod_base = um
  modified_base 15: mod_base = um
  modified_base 16: mod_base = um
  modified_base 17: mod_base = cm
  modified_base 18: mod_base = um
  modified_base 19: mod_base = OTHER; note = 2'-O-methyladenosine
  modified_base 20: mod_base = cm
  modified_base 21: mod_base = um
  source 1..21: mol_type = other RNA
gtccaagatggtatttctact

SEQ ID NO: 1044 - RNA, 21 nt, synthetic construct
  modified_base 1: mod_base = cm
  modified_base 1^2: mod_base = OTHER; note = phosphorothioate linkage
  modified_base 2: mod_base = OTHER; note = 2'-O-methyladenosine
  modified_base 3: mod_base = OTHER; note = 2'-O-methyladenosine
  modified_base 4: mod_base = gm
  modified_base 5: mod_base = OTHER; note = 2'-O-methyladenosine
  modified_base 6: mod_base = um
  modified_base 7: mod_base = gm
  modified_base 8: mod_base = gm
  modified_base 9: mod_base = OTHER; note = 2'-fluorouridine
  modified_base 10: mod_base = OTHER; note = 2'-fluoroadenosine
  modified_base 11: mod_base = OTHER; note = 2'-fluorouridine
  modified_base 12: mod_base = um
  modified_base 13: mod_base = um
  modified_base 14: mod_base = cm
  modified_base 15: mod_base = um
  modified_base 16: mod_base = OTHER; note = 2'-O-methyladenosine
  modified_base 17: mod_base = cm
  modified_base 18: mod_base = um
  modified_base 19: mod_base = OTHER; note = 2'-O-methyladenosine
  modified_base 20: mod_base = cm
  modified_base 21: mod_base = OTHER; note = 2'-O-methyladenosine
  source 1..21: mol_type = other RNA
caagatggtatttctactaca

SEQ ID NO: 1045 - RNA, 21 nt, synthetic construct
  modified_base 1: mod_base = cm
  modified_base 1^2: mod_base = OTHER; note = phosphorothioate linkage
  modified_base 2: mod_base = cm
  modified_base 3: mod_base = OTHER; note = 2'-O-methyladenosine
  modified_base 4: mod_base = cm
  modified_base 5: mod_base = um
  modified_base 6: mod_base = OTHER; note = 2'-O-methyladenosine
  modified_base 7: mod_base = OTHER; note = 2'-O-methyladenosine
  modified_base 8: mod_base = OTHER; note = 2'-O-methyladenosine
  modified_base 9: mod_base = OTHER; note = 2'-fluoroguanosine
  modified_base 10: mod_base = OTHER; note = 2'-fluorocytidine
  modified_base 11: mod_base = OTHER; note = 2'-fluoroadenosine
  modified_base 12: mod_base = um
  modified_base 13: mod_base = OTHER; note = 2'-O-methyladenosine
  modified_base 14: mod_base = cm
  modified_base 15: mod_base = OTHER; note = 2'-O-methyladenosine
  modified_base 16: mod_base = OTHER; note = 2'-O-methyladenosine
  modified_base 17: mod_base = um
  modified_base 18: mod_base = gm
  modified_base 19: mod_base = um
  modified_base 20: mod_base = OTHER; note = 2'-O-methyladenosine
  modified_base 21: mod_base = OTHER; note = 2'-O-methyladenosine
  source 1..21: mol_type = other RNA
ccactaaagcatacaatgtaa

SEQ ID NO: 1046 - RNA, 21 nt, synthetic construct
  modified_base 1: mod_base = gm
  modified_base 1^2: mod_base = OTHER; note = phosphorothioate linkage
  modified_base 2: mod_base = gm
  modified_base 3: mod_base = OTHER; note = 2'-O-methyladenosine
  modified_base 4: mod_base = cm
  modified_base 5: mod_base = OTHER; note = 2'-O-methyladenosine
  modified_base 6: mod_base = OTHER; note = 2'-O-methyladenosine
  modified_base 7: mod_base = gm
  modified_base 8: mod_base = gm
  modified_base 9: mod_base = OTHER; note = 2'-fluoroadenosine
  modified_base 10: mod_base = OTHER; note = 2'-fluoroadenosine
  modified_base 11: mod_base = OTHER; note = 2'-fluorocytidine
  modified_base 12: mod_base = um
  modified_base 13: mod_base = gm
  modified_base 14: mod_base = OTHER; note = 2'-O-methyladenosine
  modified_base 15: mod_base = um
  modified_base 16: mod_base = um
  modified_base 17: mod_base = OTHER; note = 2'-O-methyladenosine
  modified_base 18: mod_base = cm
  modified_base 19: mod_base = OTHER; note = 2'-O-methyladenosine
  modified_base 20: mod_base = OTHER; note = 2'-O-methyladenosine
  modified_base 21: mod_base = OTHER; note = 2'-O-methyladenosine
  source 1..21: mol_type = other RNA
ggacaaggaactgattacaaa

SEQ ID NO: 1047 - RNA, 21 nt, synthetic construct
  modified_base 1: mod_base = gm
  modified_base 1^2: mod_base = OTHER; note = phosphorothioate linkage
  modified_base 2: mod_base = cm
  modified_base 3: mod_base = OTHER; note = 2'-O-methyladenosine
  modified_base 4: mod_base = um
  modified_base 5: mod_base = gm
  modified_base 6: mod_base = gm
  modified_base 7: mod_base = um
  modified_base 8: mod_base = OTHER; note = 2'-O-methyladenosine
  modified_base 9: mod_base = OTHER; note = 2'-fluorocytidine
  modified_base 10: mod_base = OTHER; note = 2'-fluorocytidine
  modified_base 11: mod_base = OTHER; note = 2'-fluoroadenosine
  modified_base 12: mod_base = cm
  modified_base 13: mod_base = OTHER; note = 2'-O-methyladenosine
  modified_base 14: mod_base = um
  modified_base 15: mod_base = OTHER; note = 2'-O-methyladenosine
  modified_base 16: mod_base = um
  modified_base 17: mod_base = OTHER; note = 2'-O-methyladenosine
  modified_base 18: mod_base = um
  modified_base 19: mod_base = cm
  modified_base 20: mod_base = OTHER; note = 2'-O-methyladenosine
  modified_base 21: mod_base = OTHER; note = 2'-O-methyladenosine
  source 1..21: mol_type = other RNA
gcatggtaccacatatatcaa

SEQ ID NO: 1048 - RNA, 21 nt, synthetic construct
  modified_base 1: mod_base = gm
  modified_base 1^2: mod_base = OTHER; note = phosphorothioate linkage
  modified_base 2: mod_base = um
  modified_base 3: mod_base = OTHER; note = 2'-O-methyladenosine
  modified_base 4: mod_base = cm
  modified_base 5: mod_base = um
  modified_base 6: mod_base = gm
  modified_base 7: mod_base = OTHER; note = 2'-O-methyladenosine
  modified_base 8: mod_base = cm
  modified_base 9: mod_base = OTHER; note = 2'-fluoroadenosine
  modified_base 10: mod_base = OTHER; note = 2'-fluorouridine
  modified_base 11: mod_base = OTHER; note = 2'-fluorouridine
  modified_base 12: mod_base = OTHER; note = 2'-O-methyladenosine
  modified_base 13: mod_base = gm
  modified_base 14: mod_base = OTHER; note = 2'-O-methyladenosine
  modified_base 15: mod_base = um
  modified_base 16: mod_base = OTHER; note = 2'-O-methyladenosine
  modified_base 17: mod_base = OTHER; note = 2'-O-methyladenosine
  modified_base 18: mod_base = um
  modified_base 19: mod_base = cm
  modified_base 20: mod_base = OTHER; note = 2'-O-methyladenosine
  modified_base 21: mod_base = OTHER; note = 2'-O-methyladenosine
  source 1..21: mol_type = other RNA
gtactgacattagataatcaa

SEQ ID NO: 1049 - RNA, 21 nt, synthetic construct
  modified_base 1: mod_base = gm
  modified_base 1^2: mod_base = OTHER; note = phosphorothioate linkage
  modified_base 2: mod_base = gm
  modified_base 3: mod_base = OTHER; note = 2'-O-methyladenosine
  modified_base 4: mod_base = um
  modified_base 5: mod_base = gm
  modified_base 6: mod_base = um
  modified_base 7: mod_base = OTHER; note = 2'-O-methyladenosine
  modified_base 8: mod_base = OTHER; note = 2'-O-methyladenosine
  modified_base 9: mod_base = OTHER; note = 2'-fluoroadenosine
  modified_base 10: mod_base = OTHER; note = 2'-fluorocytidine
  modified_base 11: mod_base = OTHER; note = 2'-fluorouridine
  modified_base 12: mod_base = um
  modified_base 13: mod_base = OTHER; note = 2'-O-methyladenosine
  modified_base 14: mod_base = cm
  modified_base 15: mod_base = OTHER; note = 2'-O-methyladenosine
  modified_base 16: mod_base = um
  modified_base 17: mod_base = OTHER; note = 2'-O-methyladenosine
  modified_base 18: mod_base = gm
  modified_base 19: mod_base = cm
  modified_base 20: mod_base = um
  modified_base 21: mod_base = OTHER; note = 2'-O-methyladenosine
  source 1..21: mol_type = other RNA
ggatgtaaacttacatagcta

SEQ ID NO: 1050 - RNA, 21 nt, synthetic construct
  modified_base 1: mod_base = cm
  modified_base 1^2: mod_base = OTHER; note = phosphorothioate linkage
  modified_base 2: mod_base = OTHER; note = 2'-O-methyladenosine
  modified_base 3: mod_base = um
  modified_base 4: mod_base = OTHER; note = 2'-O-methyladenosine
  modified_base 5: mod_base = cm
  modified_base 6: mod_base = OTHER; note = 2'-O-methyladenosine
  modified_base 7: mod_base = OTHER; note = 2'-O-methyladenosine
  modified_base 8: mod_base = um
  modified_base 9: mod_base = OTHER; note = 2'-fluoroguanosine
  modified_base 10: mod_base = OTHER; note = 2'-fluorocytidine
  modified_base 11: mod_base = OTHER; note = 2'-fluorouridine
  modified_base 12: mod_base = OTHER; note = 2'-O-methyladenosine
  modified_base 13: mod_base = gm
  modified_base 14: mod_base = um
  modified_base 15: mod_base = um
  modified_base 16: mod_base = OTHER; note = 2'-O-methyladenosine
  modified_base 17: mod_base = OTHER; note = 2'-O-methyladenosine
  modified_base 18: mod_base = OTHER; note = 2'-O-methyladenosine
  modified_base 19: mod_base = cm
  modified_base 20: mod_base = OTHER; note = 2'-O-methyladenosine
  modified_base 21: mod_base = OTHER; note = 2'-O-methyladenosine
  source 1..21: mol_type = other RNA
catacaatgctagttaaacaa

SEQ ID NO: 1051 - RNA, 21 nt, synthetic construct
  modified_base 1: mod_base = um
  modified_base 1^2: mod_base = OTHER; note = phosphorothioate linkage
  modified_base 2: mod_base = gm
  modified_base 3: mod_base = cm
  modified_base 4: mod_base = um
  modified_base 5: mod_base = gm
  modified_base 6: mod_base = um
  modified_base 7: mod_base = gm
  modified_base 8: mod_base = gm
  modified_base 9: mod_base = OTHER; note = 2'-fluorouridine
  modified_base 10: mod_base = um
  modified_base 11: mod_base = OTHER; note = 2'-fluoroadenosine
  modified_base 12: mod_base = um
  modified_base 13: mod_base = OTHER; note = 2'-fluoroadenosine
  modified_base 14: mod_base = cm
  modified_base 15: mod_base = cm
  modified_base 16: mod_base = um
  modified_base 17: mod_base = OTHER; note = 2'-O-methyladenosine
  modified_base 18: mod_base = cm
  modified_base 19: mod_base = um
  modified_base 20: mod_base = OTHER; note = 2'-O-methyladenosine
  modified_base 21: mod_base = OTHER; note = 2'-O-methyladenosine
  source 1..21: mol_type = other RNA
tgctgtggttatacctactaa

SEQ ID NO: 1052 - RNA, 21 nt, synthetic construct
  modified_base 1: mod_base = gm
  modified_base 1^2: mod_base = OTHER; note = phosphorothioate linkage
  modified_base 2: mod_base = cm
  modified_base 3: mod_base = OTHER; note = 2'-O-methyladenosine
  modified_base 4: mod_base = OTHER; note = 2'-O-methyladenosine
  modified_base 5: mod_base = um
  modified_base 6: mod_base = cm
  modified_base 7: mod_base = OTHER; note = 2'-fluorouridine
  modified_base 8: mod_base = um
  modified_base 9: mod_base = OTHER; note = 2'-fluoroadenosine
  modified_base 10: mod_base = OTHER; note = 2'-O-methyladenosine
  modified_base 11: mod_base = OTHER; note = 2'-fluoroguanosine
  modified_base 12: mod_base = OTHER; note = 2'-O-methyladenosine
  modified_base 13: mod_base = cm
  modified_base 14: mod_base = OTHER; note = 2'-O-methyladenosine
  modified_base 15: mod_base = cm
  modified_base 16: mod_base = um
  modified_base 17: mod_base = um
  modified_base 18: mod_base = cm
  modified_base 19: mod_base = um
  modified_base 20: mod_base = um
  modified_base 21: mod_base = um
  source 1..21: mol_type = other RNA
gcaatcttaagacacttcttt

SEQ ID NO: 1053 - RNA, 21 nt, synthetic construct
  modified_base 1: mod_base = gm
  modified_base 1^2: mod_base = OTHER; note = phosphorothioate linkage
  modified_base 2: mod_base = cm
  modified_base 3: mod_base = um
  modified_base 4: mod_base = gm
  modified_base 5: mod_base = OTHER; note = 2'-O-methyladenosine
  modified_base 6: mod_base = OTHER; note = 2'-O-methyladenosine
  modified_base 7: mod_base = OTHER; note = 2'-fluorouridine
  modified_base 8: mod_base = OTHER; note = 2'-O-methyladenosine
  modified_base 9: mod_base = OTHER; note = 2'-fluoroadenosine
  modified_base 10: mod_base = gm
  modified_base 11: mod_base = OTHER; note = 2'-fluorocytidine
  modified_base 12: mod_base = OTHER; note = 2'-O-methyladenosine
  modified_base 13: mod_base = um
  modified_base 14: mod_base = OTHER; note = 2'-O-methyladenosine
  modified_base 15: mod_base = um
  modified_base 16: mod_base = um
  modified_base 17: mod_base = gm
  modified_base 18: mod_base = OTHER; note = 2'-O-methyladenosine
  modified_base 19: mod_base = cm
  modified_base 20: mod_base = OTHER; note = 2 -O-methylinosine
  modified_base 21: mod_base = OTHER; note = 2'-O-methyladenosine
  source 1..21: mol_type = other RNA
gctgaataagcatattgacna

SEQ ID NO: 1054 - RNA, 21 nt, synthetic construct
  modified_base 1: mod_base = gm
  modified_base 1^2: mod_base = OTHER; note = phosphorothioate linkage
  modified_base 2: mod_base = um
  modified_base 3: mod_base = cm
  modified_base 4: mod_base = cm
  modified_base 5: mod_base = OTHER; note = 2'-O-methyladenosine
  modified_base 6: mod_base = OTHER; note = 2'-O-methyladenosine
  modified_base 7: mod_base = gm
  modified_base 8: mod_base = OTHER; note = 2'-O-methyladenosine
  modified_base 9: mod_base = OTHER; note = 2'-fluorouridine
  modified_base 10: mod_base = OTHER; note = 2'-fluoroguanosine
  modified_base 11: mod_base = OTHER; note = 2'-fluoroguanosine
  modified_base 12: mod_base = um
  modified_base 13: mod_base = OTHER; note = 2'-O-methyladenosine
  modified_base 14: mod_base = um
  modified_base 15: mod_base = um
  modified_base 16: mod_base = um
  modified_base 17: mod_base = cm
  modified_base 18: mod_base = um
  modified_base 19: mod_base = OTHER; note = 2'-O-methyladenosine
  modified_base 20: mod_base = cm
  modified_base 21: mod_base = OTHER; note = 2'-O-methyladenosine
  source 1..21: mol_type = other RNA
gtccaagatggtatttctaca

SEQ ID NO: 1055 - RNA, 21 nt, synthetic construct
  modified_base 1: mod_base = cm
  modified_base 1^2: mod_base = OTHER; note = phosphorothioate linkage
  modified_base 2: mod_base = gm
  modified_base 3: mod_base = OTHER; note = 2'-O-methyladenosine
  modified_base 4: mod_base = OTHER; note = 2'-O-methyladenosine
  modified_base 5: mod_base = gm
  modified_base 6: mod_base = um
  modified_base 7: mod_base = OTHER; note = 2'-O-methyladenosine
  modified_base 8: mod_base = gm
  modified_base 9: mod_base = OTHER; note = 2'-fluorouridine
  modified_base 10: mod_base = gm
  modified_base 11: mod_base = OTHER; note = 2'-fluoroguanosine
  modified_base 12: mod_base = OTHER; note = 2'-O-methyladenosine
  modified_base 13: mod_base = OTHER; note = 2'-fluoroadenosine
  modified_base 14: mod_base = OTHER; note = 2'-O-methyladenosine
  modified_base 15: mod_base = OTHER; note = 2'-O-methyladenosine
  modified_base 16: mod_base = um
  modified_base 17: mod_base = cm
  modified_base 18: mod_base = cm
  modified_base 19: mod_base = um
  modified_base 20: mod_base = OTHER; note = 2'-O-methyladenosine
  modified_base 21: mod_base = OTHER; note = 2'-O-methyladenosine
  source 1..21: mol_type = other RNA
cgaagtagtggaaaatcctaa

SEQ ID NO: 1056 - RNA, 21 nt, synthetic construct
  modified_base 1: mod_base = gm
  modified_base 1^2: mod_base = OTHER; note = phosphorothioate linkage
  modified_base 2: mod_base = gm
  modified_base 3: mod_base = OTHER; note = 2'-O-methyladenosine
  modified_base 4: mod_base = cm
  modified_base 5: mod_base = OTHER; note = 2'-O-methyladenosine
  modified_base 6: mod_base = OTHER; note = 2'-O-methyladenosine
  modified_base 7: mod_base = gm
  modified_base 8: mod_base = gm
  modified_base 9: mod_base = OTHER; note = 2'-fluoroadenosine
  modified_base 10: mod_base = OTHER; note = 2'-O-methyladenosine
  modified_base 11: mod_base = OTHER; note = 2'-fluorocytidine
  modified_base 12: mod_base = um
  modified_base 13: mod_base = OTHER; note = 2'-fluoroguanosine
  modified_base 14: mod_base = OTHER; note = 2'-O-methyladenosine
  modified_base 15: mod_base = um
  modified_base 16: mod_base = um
  modified_base 17: mod_base = OTHER; note = 2'-O-methyladenosine
  modified_base 18: mod_base = cm
  modified_base 19: mod_base = OTHER; note = 2'-O-methyladenosine
  modified_base 20: mod_base = OTHER; note = 2'-O-methyladenosine
  modified_base 21: mod_base = OTHER; note = 2'-O-methyladenosine
  source 1..21: mol_type = other RNA
ggacaaggaactgattacaaa

SEQ ID NO: 1057 - RNA, 21 nt, synthetic construct
  modified_base 1: mod_base = um
  modified_base 1^2: mod_base = OTHER; note = phosphorothioate linkage
  modified_base 2: mod_base = gm
  modified_base 3: mod_base = cm
  modified_base 4: mod_base = um
  modified_base 5: mod_base = gm
  modified_base 6: mod_base = um
  modified_base 7: mod_base = gm
  modified_base 8: mod_base = gm
  modified_base 9: mod_base = OTHER; note = 2'-fluorouridine
  modified_base 10: mod_base = OTHER; note = 2'-fluorouridine
  modified_base 11: mod_base = OTHER; note = 2'-fluoroadenosine
  modified_base 12: mod_base = um
  modified_base 13: mod_base = OTHER; note = 2'-O-methyladenosine
  modified_base 14: mod_base = cm
  modified_base 15: mod_base = cm
  modified_base 16: mod_base = um
  modified_base 17: mod_base = OTHER; note = 2'-O-methyladenosine
  modified_base 18: mod_base = cm
  modified_base 19: mod_base = um
  modified_base 20: mod_base = OTHER; note = 2'-O-methyladenosine
  modified_base 21: mod_base = OTHER; note = 2'-O-methyladenosine
  source 1..21: mol_type = other RNA
tgctgtggttatacctactaa

SEQ ID NO: 1058 - RNA, 21 nt, synthetic construct
  modified_base 1: mod_base = cm
  modified_base 1^2: mod_base = OTHER; note = phosphorothioate linkage
  modified_base 2: mod_base = OTHER; note = 2'-O-methyladenosine
  modified_base 3: mod_base = um
  modified_base 4: mod_base = OTHER; note = 2'-O-methyladenosine
  modified_base 5: mod_base = cm
  modified_base 6: mod_base = OTHER; note = 2'-O-methyladenosine
  modified_base 7: mod_base = OTHER; note = 2'-O-methyladenosine
  modified_base 8: mod_base = um
  modified_base 9: mod_base = OTHER; note = 2'-fluoroguanosine
  modified_base 10: mod_base = cm
  modified_base 11: mod_base = OTHER; note = 2'-fluorouridine
  modified_base 12: mod_base = OTHER; note = 2'-O-methyladenosine
  modified_base 13: mod_base = OTHER; note = 2'-fluoroguanosine
  modified_base 14: mod_base = um
  modified_base 15: mod_base = um
  modified_base 16: mod_base = OTHER; note = 2'-O-methyladenosine
  modified_base 17: mod_base = OTHER; note = 2'-O-methyladenosine
  modified_base 18: mod_base = OTHER; note = 2'-O-methyladenosine
  modified_base 19: mod_base = cm
  modified_base 20: mod_base = OTHER; note = 2'-O-methyladenosine
  modified_base 21: mod_base = OTHER; note = 2'-O-methyladenosine
  source 1..21: mol_type = other RNA
catacaatgctagttaaacaa

SEQ ID NO: 1059 - RNA, 21 nt, synthetic construct
  modified_base 1: mod_base = cm
  modified_base 1^2: mod_base = OTHER; note = phosphorothioate linkage
  modified_base 2: mod_base = gm
  modified_base 3: mod_base = um
  modified_base 4: mod_base = OTHER; note = 2'-O-methyladenosine
  modified_base 5: mod_base = OTHER; note = 2'-O-methyladenosine
  modified_base 6: mod_base = um
  modified_base 7: mod_base = cm
  modified_base 8: mod_base = OTHER; note = 2'-O-methyladenosine
  modified_base 9: mod_base = OTHER; note = 2'-fluoroguanosine
  modified_base 10: mod_base = gm
  modified_base 11: mod_base = OTHER; note = 2'-fluoroadenosine
  modified_base 12: mod_base = um
  modified_base 13: mod_base = OTHER; note = 2'-fluoroguanosine
  modified_base 14: mod_base = um
  modified_base 15: mod_base = OTHER; note = 2'-O-methyladenosine
  modified_base 16: mod_base = OTHER; note = 2'-O-methyladenosine
  modified_base 17: mod_base = OTHER; note = 2'-O-methyladenosine
  modified_base 18: mod_base = cm
  modified_base 19: mod_base = um
  modified_base 20: mod_base = um
  modified_base 21: mod_base = OTHER; note = 2'-O-methyladenosine
  source 1..21: mol_type = other RNA
cgtaatcaggatgtaaactta

SEQ ID NO: 1060 - RNA, 21 nt, synthetic construct
  source 1..21: mol_type = other RNA
aaactgagttggacgtgtgtc

SEQ ID NO: 1061 - RNA, 21 nt, synthetic construct
  source 1..21: mol_type = other RNA
tgattttccactacttcttcc

SEQ ID NO: 1062 - RNA, 21 nt, synthetic construct
  source 1..21: mol_type = other RNA
ttaggattttccactacttcc

SEQ ID NO: 1063 - RNA, 21 nt, synthetic construct
  source 1..21: mol_type = other RNA
aaaccaacactaccacatgac

SEQ ID NO: 1064 - RNA, 21 nt, synthetic construct
  source 1..21: mol_type = other RNA
atacatttgggtcatagcttg

SEQ ID NO: 1065 - RNA, 21 nt, synthetic construct
  source 1..21: mol_type = other RNA
tgatatatgtggtaccatgtc

SEQ ID NO: 1066 - RNA, 21 nt, synthetic construct
  source 1..21: mol_type = other RNA
ttgatatatgtggtaccatgc

SEQ ID NO: 1067 - RNA, 21 nt, synthetic construct
  source 1..21: mol_type = other RNA
tttacatcctgattatgtacc

SEQ ID NO: 1068 - RNA, 21 nt, synthetic construct
  source 1..21: mol_type = other RNA
aagtttacatcctgattatgc

SEQ ID NO: 1069 - RNA, 21 nt, synthetic construct
  source 1..21: mol_type = other RNA
taagtttacatcctgattatg

SEQ ID NO: 1070 - RNA, 21 nt, synthetic construct
  source 1..21: mol_type = other RNA
tagctatgtaagtttacatcc

SEQ ID NO: 1071 - RNA, 21 nt, synthetic construct
  source 1..21: mol_type = other RNA
ataataaagtctagccttacc

SEQ ID NO: 1072 - RNA, 21 nt, synthetic construct
  source 1..21: mol_type = other RNA
ttactacagatagagacacca

SEQ ID NO: 1073 - RNA, 21 nt, synthetic construct
  source 1..21: mol_type = other RNA
tatagtactacagatagagac

SEQ ID NO: 1074 - RNA, 21 nt, synthetic construct
  source 1..21: mol_type = other RNA
tcatagtactacagatagagc

SEQ ID NO: 1075 - RNA, 21 nt, synthetic construct
  source 1..21: mol_type = other RNA
tgtcatagtactacagatagc

SEQ ID NO: 1076 - RNA, 21 nt, synthetic construct
  source 1..21: mol_type = other RNA
taatttgcaacattgctagac

SEQ ID NO: 1077 - RNA, 21 nt, synthetic construct
  source 1..21: mol_type = other RNA
tcatcatagagatgagtcttc

SEQ ID NO: 1078 - RNA, 21 nt, synthetic construct
  source 1..21: mol_type = other RNA
ttccaattaatgtgactccac

SEQ ID NO: 1079 - RNA, 21 nt, synthetic construct
  source 1..21: mol_type = other RNA
tacataagttcgtactcatcc

SEQ ID NO: 1080 - RNA, 21 nt, synthetic construct
  source 1..21: mol_type = other RNA
tgaatgagtacataagttcgt

SEQ ID NO: 1081 - RNA, 21 nt, synthetic construct
  source 1..21: mol_type = other RNA
acgaatgagtacataagttcg

SEQ ID NO: 1082 - RNA, 21 nt, synthetic construct
  source 1..21: mol_type = other RNA
tgaaacgaatgagtacataag

SEQ ID NO: 1083 - RNA, 21 nt, synthetic construct
  source 1..21: mol_type = other RNA
aagaagtacgctattaactac

SEQ ID NO: 1084 - RNA, 21 nt, synthetic construct
  source 1..21: mol_type = other RNA
aagaataccacgaaagcaagc

SEQ ID NO: 1085 - RNA, 21 nt, synthetic construct
  source 1..21: mol_type = other RNA
tagtaaggatggctagtgtac

SEQ ID NO: 1086 - RNA, 21 nt, synthetic construct
  source 1..21: mol_type = other RNA
ttaacaatattgcagcagtac

SEQ ID NO: 1087 - RNA, 21 nt, synthetic construct
  source 1..21: mol_type = other RNA
acgttaacaatattgcagcag

SEQ ID NO: 1088 - RNA, 21 nt, synthetic construct
  source 1..21: mol_type = other RNA
tacgttaacaatattgcagca

SEQ ID NO: 1089 - RNA, 21 nt, synthetic construct
  source 1..21: mol_type = other RNA
tgtttagaccagaagatcagg

SEQ ID NO: 1090 - RNA, 21 nt, synthetic construct
  source 1..21: mol_type = other RNA
aataagaaagcgttcgtgatg

SEQ ID NO: 1091 - RNA, 21 nt, synthetic construct
  source 1..21: mol_type = other RNA
tttgtaataagaaagcgttcg

SEQ ID NO: 1092 - RNA, 21 nt, synthetic construct
  source 1..21: mol_type = other RNA
tatctgttgtcacttactgtc

SEQ ID NO: 1093 - RNA, 21 nt, synthetic construct
  source 1..21: mol_type = other RNA
aacatctgttgtcacttactg

SEQ ID NO: 1094 - RNA, 21 nt, synthetic construct
  source 1..21: mol_type = other RNA
tgatctttgtcatccaatttg

SEQ ID NO: 1095 - RNA, 21 nt, synthetic construct
  source 1..21: mol_type = other RNA
tattaaagattgctatgtgag

SEQ ID NO: 1096 - RNA, 21 nt, synthetic construct
  source 1..21: mol_type = other RNA
ttgtctaacaacatcaaaagg

SEQ ID NO: 1097 - RNA, 21 nt, synthetic construct
  source 1..21: mol_type = other RNA
tcttgatctaaagcattacca

SEQ ID NO: 1098 - RNA, 21 nt, synthetic construct
  source 1..21: mol_type = other RNA
tgtttaactagcattgtatgc

SEQ ID NO: 1099 - RNA, 21 nt, synthetic construct
  source 1..21: mol_type = other RNA
ttgtttaactagcattgtatg

SEQ ID NO: 1100 - RNA, 21 nt, synthetic construct
  source 1..21: mol_type = other RNA
tctctatcagacattatgcac

SEQ ID NO: 1101 - RNA, 21 nt, synthetic construct
  source 1..21: mol_type = other RNA
tcattaagatctgaatcgacc

SEQ ID NO: 1102 - RNA, 21 nt, synthetic construct
  source 1..21: mol_type = other RNA
tccaatttggtcatctggacc

SEQ ID NO: 1103 - RNA, 21 nt, synthetic construct
  source 1..21: mol_type = other RNA
tcaaattgtgcaatttgcggc

SEQ ID NO: 1104 - RNA, 21 nt, synthetic construct
  source 1..21: mol_type = other RNA
tgaatgttttgtatgcgtcac

SEQ ID NO: 1105 - RNA, 21 nt, synthetic construct
  source 1..21: mol_type = other RNA
tggaatttaaggtcttccttg

SEQ ID NO: 1106 - RNA, 21 nt, synthetic construct
  source 1..21: mol_type = other RNA
tgctattggtgttaattggac

SEQ ID NO: 1107 - RNA, 21 nt, synthetic construct
  source 1..21: mol_type = other RNA
agtagaaataccatcttggac

SEQ ID NO: 1108 - RNA, 21 nt, synthetic construct
  source 1..21: mol_type = other RNA
tgtagtagaaataccatcttg

SEQ ID NO: 1109 - RNA, 21 nt, synthetic construct
  source 1..21: mol_type = other RNA
ttgatcttttggtgtattcac

SEQ ID NO: 1110 - RNA, 21 nt, synthetic construct
  source 1..21: mol_type = other RNA
tagcagatttcttagtgacag

SEQ ID NO: 1111 - RNA, 21 nt, synthetic construct
  source 1..21: mol_type = other RNA
ttacattgtatgctttagtgg

SEQ ID NO: 1112 - RNA, 21 nt, synthetic construct
  source 1..21: mol_type = other RNA
tgtaatcagttccttgtctgc

SEQ ID NO: 1113 - RNA, 21 nt, synthetic construct
  source 1..21: mol_type = other RNA
tttgtaatcagttccttgtcc

SEQ ID NO: 1114 - RNA, 21 nt, synthetic construct
  source 1..21: mol_type = other RNA
tcaatgtttgtaatcagttcc

SEQ ID NO: 1115 - RNA, 21 nt, synthetic construct
  source 1..21: mol_type = other RNA
tcgtcaatatgcttattcagc

SEQ ID NO: 1116 - RNA, 21 nt, synthetic construct
  source 1..21: mol_type = other RNA
tcataagcactcttaagaagc

SEQ ID NO: 1117 - RNA, 21 nt, synthetic construct
  source 1..21: mol_type = other RNA
ttagataagacattgtctaag

SEQ ID NO: 1118 - RNA, 21 nt, synthetic construct
  source 1..21: mol_type = other RNA
tatgaagattgccattaatgc

SEQ ID NO: 1119 - RNA, 21 nt, synthetic construct
  source 1..21: mol_type = other RNA
aaacgtattaacgtaagcatc

SEQ ID NO: 1120 - RNA, 21 nt, synthetic construct
  source 1..21: mol_type = other RNA
tcttaagattgtcaaaggtgc

SEQ ID NO: 1121 - RNA, 21 nt, synthetic construct
  source 1..21: mol_type = other RNA
ttgattatctaatgtcagtac

SEQ ID NO: 1122 - RNA, 21 nt, synthetic construct
  source 1..21: mol_type = other RNA
ttagtaggtataaccacagca

SEQ ID NO: 1123 - RNA, 21 nt, synthetic construct
  source 1..21: mol_type = other RNA
aaagaagtgtcttaagattgc

SEQ ID NO: 1124 - RNA, 21 nt, synthetic construct
  source 1..21: mol_type = other RNA
ttcataagcactcttaagaag

SEQ ID NO: 1125 - RNA, 21 nt, synthetic construct
  source 1..21: mol_type = other RNA
tgtagaaataccatcttggac

SEQ ID NO: 1126 - RNA, 21 nt, synthetic construct
  source 1..21: mol_type = other RNA
ttaggattttccactacttcg

SEQ ID NO: 1127 - RNA, 21 nt, synthetic construct
  source 1..21: mol_type = other RNA
ttgtttaactagcattgtacg

SEQ ID NO: 1128 - RNA, 21 nt, synthetic construct
  source 1..21: mol_type = other RNA
tttgtaatcagttccttgtcg

SEQ ID NO: 1129 - RNA, 21 nt, synthetic construct
  source 1..21: mol_type = other RNA
taagtttacatcctgattacg

SEQ ID NO: 1130 - RNA, 21 nt, synthetic construct
  source 1..21: mol_type = other RNA
aagaagtgtcttaagattgtc

SEQ ID NO: 1131 - RNA, 21 nt, synthetic construct
  source 1..21: mol_type = other RNA
tcataagaaagtgtgcccatg

SEQ ID NO: 1132 - RNA, 21 nt, synthetic construct
  source 1..21: mol_type = other RNA
taacttagggtcaatttctgt

SEQ ID NO: 1133 - RNA, 21 nt, synthetic construct
  source 1..21: mol_type = other RNA
tcattaagatctgaatcgaca

SEQ ID NO: 1134 - RNA, 21 nt, synthetic construct
  source 1..21: mol_type = other RNA
tttgtaatcagttccttgtct

SEQ ID NO: 1135 - RNA, 21 nt, synthetic construct
  source 1..21: mol_type = other RNA
gacacacgtccaactcagttt

SEQ ID NO: 1136 - RNA, 21 nt, synthetic construct
  source 1..21: mol_type = other RNA
ggaagaagtagtggaaaatca

SEQ ID NO: 1137 - RNA, 21 nt, synthetic construct
  source 1..21: mol_type = other RNA
ggaagtagtggaaaatcctaa

SEQ ID NO: 1138 - RNA, 21 nt, synthetic construct
  source 1..21: mol_type = other RNA
gtcatgtggtagtgttngttt

SEQ ID NO: 1139 - RNA, 21 nt, synthetic construct
  source 1..21: mol_type = other RNA
caagctatgacccaaatgtat

SEQ ID NO: 1140 - RNA, 21 nt, synthetic construct
  source 1..21: mol_type = other RNA
gacatggtaccacatatatca

SEQ ID NO: 1141 - RNA, 21 nt, synthetic construct
  source 1..21: mol_type = other RNA
gcatggtaccacatatatcaa

SEQ ID NO: 1142 - RNA, 21 nt, synthetic construct
  source 1..21: mol_type = other RNA
ggtacataatcaggatgtaaa

SEQ ID NO: 1143 - RNA, 21 nt, synthetic construct
  source 1..21: mol_type = other RNA
gcataatcaggatgtaaactt

SEQ ID NO: 1144 - RNA, 21 nt, synthetic construct
  source 1..21: mol_type = other RNA
cataatcaggatgtaaactta

SEQ ID NO: 1145 - RNA, 21 nt, synthetic construct
  source 1..21: mol_type = other RNA
ggatgtaaacttacatagcta

SEQ ID NO: 1146 - RNA, 21 nt, synthetic construct
  source 1..21: mol_type = other RNA
ggtaaggctagactttattat

SEQ ID NO: 1147 - RNA, 21 nt, synthetic construct
  source 1..21: mol_type = other RNA
tggtgtctctatctgtagtaa

SEQ ID NO: 1148 - RNA, 21 nt, synthetic construct
  source 1..21: mol_type = other RNA
gtctctatctgtagtactata

SEQ ID NO: 1149 - RNA, 21 nt, synthetic construct
  source 1..21: mol_type = other RNA
gctctatctgtagtactatga

SEQ ID NO: 1150 - RNA, 21 nt, synthetic construct
  source 1..21: mol_type = other RNA
gctatctgtagtactatgaca

SEQ ID NO: 1151 - RNA, 21 nt, synthetic construct
  source 1..21: mol_type = other RNA
gtctagcaatgttgcaaatta

SEQ ID NO: 1152 - RNA, 21 nt, synthetic construct
  source 1..21: mol_type = other RNA
gaagactcatctctatgatga

SEQ ID NO: 1153 - RNA, 21 nt, synthetic construct
  source 1..21: mol_type = other RNA
gtggagtcacattaattggaa

SEQ ID NO: 1154 - RNA, 21 nt, synthetic construct
  source 1..21: mol_type = other RNA
ggatgagtacgaacttatgta

SEQ ID NO: 1155 - RNA, 21 nt, synthetic construct
  source 1..21: mol_type = other RNA
acgaacttatgtactcattca

SEQ ID NO: 1156 - RNA, 21 nt, synthetic construct
  source 1..21: mol_type = other RNA
cgaacttatgtactcattcgt

SEQ ID NO: 1157 - RNA, 21 nt, synthetic construct
  source 1..21: mol_type = other RNA
cttatgtactcattcgtttca

SEQ ID NO: 1158 - RNA, 21 nt, synthetic construct
  source 1..21: mol_type = other RNA
cttatgtactcattcntttca

SEQ ID NO: 1159 - RNA, 21 nt, synthetic construct
  source 1..21: mol_type = other RNA
gtagttaatagcgtacttctt

SEQ ID NO: 1160 - RNA, 21 nt, synthetic construct
  source 1..21: mol_type = other RNA
gcttgctttcgtggtattctt

SEQ ID NO: 1161 - RNA, 21 nt, synthetic construct
  source 1..21: mol_type = other RNA
gtacactagccatccttacta

SEQ ID NO: 1162 - RNA, 21 nt, synthetic construct
  source 1..21: mol_type = other RNA
gtactgctgcaatattgttaa

SEQ ID NO: 1163 - RNA, 21 nt, synthetic construct
  source 1..21: mol_type = other RNA
ctgctgcaatattgttaacgt

SEQ ID NO: 1164 - RNA, 21 nt, synthetic construct
  source 1..21: mol_type = other RNA
tgctgcaatattgttaacgta

SEQ ID NO: 1165 - RNA, 21 nt, synthetic construct
  source 1..21: mol_type = other RNA
cctgatcttctggtctaaaca

SEQ ID NO: 1166 - RNA, 21 nt, synthetic construct
  source 1..21: mol_type = other RNA
catcacgaacgctttcttatt

SEQ ID NO: 1167 - RNA, 21 nt, synthetic construct
  source 1..21: mol_type = other RNA
cgaacgctttcttattacaaa

SEQ ID NO: 1168 - RNA, 21 nt, synthetic construct
  source 1..21: mol_type = other RNA
gacagtaagtgacaacagata

SEQ ID NO: 1169 - RNA, 21 nt, synthetic construct
  source 1..21: mol_type = other RNA
cagtaagtgacaacagatgtt

SEQ ID NO: 1170 - RNA, 21 nt, synthetic construct
  source 1..21: mol_type = other RNA
caaattggatgacaaagatca

SEQ ID NO: 1171 - RNA, 21 nt, synthetic construct
  source 1..21: mol_type = other RNA
ctcacatagcaatctttaata

SEQ ID NO: 1172 - RNA, 21 nt, synthetic construct
  source 1..21: mol_type = other RNA
ccttttgatgttgttagacaa

SEQ ID NO: 1173 - RNA, 21 nt, synthetic construct
  source 1..21: mol_type = other RNA
tggtaatgctttagatcaaga

SEQ ID NO: 1174 - RNA, 21 nt, synthetic construct
  source 1..21: mol_type = other RNA
gcatacaatgctagttaaaca

SEQ ID NO: 1175 - RNA, 21 nt, synthetic construct
  source 1..21: mol_type = other RNA
catacaatgctagttaaacaa

SEQ ID NO: 1176 - RNA, 21 nt, synthetic construct
  source 1..21: mol_type = other RNA
gtgcataatgtctgatagaga

SEQ ID NO: 1177 - RNA, 21 nt, synthetic construct
  source 1..21: mol_type = other RNA
ggtcgattcagatcttaatga

SEQ ID NO: 1178 - RNA, 21 nt, synthetic construct
  source 1..21: mol_type = other RNA
ggtccagatgaccaaattgga

SEQ ID NO: 1179 - RNA, 21 nt, synthetic construct
  source 1..21: mol_type = other RNA
gccgcaaattgcacaatttga

SEQ ID NO: 1180 - RNA, 21 nt, synthetic construct
  source 1..21: mol_type = other RNA
gtgacgcatacaaaacattca

SEQ ID NO: 1181 - RNA, 21 nt, synthetic construct
  source 1..21: mol_type = other RNA
caaggaagaccttaaattcca

SEQ ID NO: 1182 - RNA, 21 nt, synthetic construct
  source 1..21: mol_type = other RNA
gtccaattaacaccaatagca

SEQ ID NO: 1183 - RNA, 21 nt, synthetic construct
  source 1..21: mol_type = other RNA
gtccaagatggtatttctact

SEQ ID NO: 1184 - RNA, 21 nt, synthetic construct
  source 1..21: mol_type = other RNA
caagatggtatttctactaca

SEQ ID NO: 1185 - RNA, 21 nt, synthetic construct
  source 1..21: mol_type = other RNA
gtgaatacaccaaaagatcaa

SEQ ID NO: 1186 - RNA, 21 nt, synthetic construct
  source 1..21: mol_type = other RNA
ctgtcactaagaaatctncta

SEQ ID NO: 1187 - RNA, 21 nt, synthetic construct
  source 1..21: mol_type = other RNA
ccactaaagcatacaatgtaa

SEQ ID NO: 1188 - RNA, 21 nt, synthetic construct
  source 1..21: mol_type = other RNA
gcagacaaggaactgattaca

SEQ ID NO: 1189 - RNA, 21 nt, synthetic construct
  source 1..21: mol_type = other RNA
ggacaaggaactgattacaaa

SEQ ID NO: 1190 - RNA, 21 nt, synthetic construct
  source 1..21: mol_type = other RNA
ggaactgattacaaacattga

SEQ ID NO: 1191 - RNA, 21 nt, synthetic construct
  source 1..21: mol_type = other RNA
gctgaataagcatattgacna

SEQ ID NO: 1192 - RNA, 21 nt, synthetic construct
  source 1..21: mol_type = other RNA
gcttcttaagagtgcttatga

SEQ ID NO: 1193 - RNA, 21 nt, synthetic construct
  source 1..21: mol_type = other RNA
cttagacaatgtcttatctaa

SEQ ID NO: 1194 - RNA, 21 nt, synthetic construct
  source 1..21: mol_type = other RNA
gcattaatggcaatcttcata

SEQ ID NO: 1195 - RNA, 21 nt, synthetic construct
  source 1..21: mol_type = other RNA
gatgcttacgttaatacgttt

SEQ ID NO: 1196 - RNA, 21 nt, synthetic construct
  source 1..21: mol_type = other RNA
gcacctttgacaatcttaaga

SEQ ID NO: 1197 - RNA, 21 nt, synthetic construct
  source 1..21: mol_type = other RNA
gtactgacattagataatcaa

SEQ ID NO: 1198 - RNA, 21 nt, synthetic construct
  source 1..21: mol_type = other RNA
tgctgtggttatacctactaa

SEQ ID NO: 1199 - RNA, 21 nt, synthetic construct
  source 1..21: mol_type = other RNA
gcaatcttaagacacttcttt

SEQ ID NO: 1200 - RNA, 21 nt, synthetic construct
  source 1..21: mol_type = other RNA
cttcttaagagtgcttatgaa

SEQ ID NO: 1201 - RNA, 21 nt, synthetic construct
  source 1..21: mol_type = other RNA
gtccaagatggtatttctaca

SEQ ID NO: 1202 - RNA, 21 nt, synthetic construct
  source 1..21: mol_type = other RNA
cgaagtagtggaaaatcctaa

SEQ ID NO: 1203 - RNA, 21 nt, synthetic construct
  source 1..21: mol_type = other RNA
cgtacaatgctagttaaacaa

SEQ ID NO: 1204 - RNA, 21 nt, synthetic construct
  source 1..21: mol_type = other RNA
cgacaaggaactgattacaaa

SEQ ID NO: 1205 - RNA, 21 nt, synthetic construct
  source 1..21: mol_type = other RNA
cgtaatcaggatgtaaactta

SEQ ID NO: 1206 - RNA, 21 nt, synthetic construct
  source 1..21: mol_type = other RNA
gacaatcttaagacacttctt

SEQ ID NO: 1207 - RNA, 21 nt, synthetic construct
  source 1..21: mol_type = other RNA
catgggcacactttcttatga

SEQ ID NO: 1208 - RNA, 21 nt, synthetic construct
  source 1..21: mol_type = other RNA
acagaaattgaccctaagtta

SEQ ID NO: 1209 - RNA, 21 nt, synthetic construct
  source 1..21: mol_type = other RNA
tgtcgattcagatcttaatga

SEQ ID NO: 1210 - RNA, 21 nt, synthetic construct
  source 1..21: mol_type = other RNA
agacaaggaactgattacaaa
